(19) United States
(12) Patent Application Publication
(10) Pub. No.: US 2023/0250193 A1
(43) Pub. Date: Aug. 10, 2023

(54) ANTIBODIES TO FIBROBLAST ACTIVATION PROTEIN AND B7H3

(71) Applicant: Proviva Therapeutics (Hong Kong) Limited, Hong Kong (CN)

(72) Inventors: Zijuan LI, Shanghai (CN); Hongxing ZHOU, Bedford, MA (US)

(21) Appl. No.: 18/010,078

(22) PCT Filed: Jun. 17, 2021
(86) PCT No.: PCT/US2021/037799

§ 371 Date: Dec. 13, 2022

Related U.S. Application Data
(60) Provisional application No. 63/040,124, filed on Jun. 17, 2020.

(51) Int. Cl. C07K 16/46

(52) U.S. Cl. CPC C07K 16/468; C07K 2317/565; C07K 2317/31; C07K 2317/52; C07K 2317/92

(57) ABSTRACT

Provided are anti-fibroblast activation protein (FAP) antibodies, and antigen-binding fragments thereof, including those having dual binding specificity for human FAP and human CD276 (B7H3), which may be used in any of a variety of therapeutic or diagnostic methods, including the treatment or diagnosis of oncological diseases and others.

### CROSS-REFERENCE TO RELATED APPLICATIONS

[0001] This application claims the benefit under 35 U.S.C. § 119(e) to U.S. Provisional Application No. 63/040,124, filed Jun. 17, 2020, which is incorporated by reference in its entirety.

### STATEMENT REGARDING THE SEQUENCE LISTING

[0002] The Sequence Listing associated with this application is provided in text format in lieu of a paper copy, and is hereby incorporated by reference into the specification. The name of the text file containing the Sequence Listing is PRVA_008_01 WO_ST25.txt. The text file is about 933 KB, created on Jun. 16, 2021, and is being submitted electronically via EFS-Web.

### BACKGROUND

### Technical Field

[0003] The present disclosure relates to anti-fibroblast activation protein-α (FAPα or FAP) antibodies, and antigen-binding fragments thereof, including those having dual binding specificity for human FAP and human CD276 (B7H3), which may be used in any of a variety of therapeutic or diagnostic methods, including the treatment or diagnosis of oncological diseases and others.

### Description of the Related Art

[0004] FAP expression is seen on activated stromal fibroblasts of more than 90% of all human carcinomas (see, for example, Pure et al., Oncogene. 37: 4343-4357, 2018; and Busek et al., Frontiers in Bioscience. 23:1933-1968, 2018). Stromal fibroblasts play an important role in the development, growth, and metastasis of carcinomas. Several approaches of FAP targeting mainly in cancer treatment are currently being tested including the use of low molecular weight inhibitors, prodrugs activated by FAP, various anti-FAP antibodies and their conjugates, FAP-CAR T cells, and FAP vaccines.

[0005] CD276 (B7H3) is an immune checkpoint molecule shows high expression on certain cancer cells, and relatively low expression on cells in healthy or normal tissue. Inhibition of the B7H3 immune checkpoint has been shown to reduce tumor growth, for example, by enhancing cytotoxic lymphocyte function (see, for example, Lee et al., Cell Research. 27: 1034-1045, 2017).

[0006] However, there remains a need in the art for therapeutic antibodies that effectively target FAP, alone or in combination with B7H3. Moreover, there are technical challenges associated with engineering an antibody with defined dual-specificity at a single paratope.

### BRIEF SUMMARY

[0007] Certain embodiments include an isolated antibody, or an antigen-binding fragment thereof, which specifically binds to a human fibroblast activation protein-α (FAPα or FAP). In some embodiments, the isolated antibody, or antigen-binding fragment thereof, has dual binding specificity, and specifically binds to the human FAP and a human B7H3 protein at the same or substantially the same paratope.

[0008] In some embodiments, the isolated antibody, or antigen-binding fragment thereof, comprises:

[0009] a heavy chain variable (V_{H}) region comprising V_{H}CDR1, V_{H}CDR2, and V_{H}CDR3 regions selected from Table A1; and

[0010] a light chain variable (V_{L}) region comprising V_{L}CDR1, V_{L}CDR2, and V_{L}CDR3 regions selected from Table A1,

[0011] or a variant of said antibody, or antigen-binding fragment thereof, which has up to 1, 2, 3, 4, 5, 6, 7, or 8 total amino acid substitutions across said CDR regions and retains specific binding activity.

[0012] In some embodiments:

[0013] the V_{H}CDR1, a V_{H}CDR2, and V_{H}CDR3 regions respectively comprise SEQ ID NOs: 1-3; and the V_{L}CDR1, V_{L}CDR2, and V_{L}CDR3 regions respectively comprise SEQ ID NOs: 4-6;

[0014] the V_{H}CDR1, a V_{H}CDR2, and V_{H}CDR3 regions respectively comprise SEQ ID NOs: 7-9; and

[0015] the V_{L}CDR1, V_{L}CDR2, and V_{L}CDR3 regions respectively comprise SEQ ID NOs: 10-12;

[0016] the V_{H}CDR1, a V_{H}CDR2, and V_{H}CDR3 regions respectively comprise SEQ ID NOs: 13-15; and the V_{L}CDR1, V_{L}CDR2, and V_{L}CDR3 regions respectively comprise SEQ ID NOs: 16-18;

[0017] the V_{H}CDR1, a V_{H}CDR2, and V_{H}CDR3 regions respectively comprise SEQ ID NOs: 19-21; and the V_{L}CDR1, V_{L}CDR2, and V_{L}CDR3 regions respectively comprise SEQ ID NOs: 22-24;

[0018] the V_{H}CDR1, a V_{H}CDR2, and V_{H}CDR3 regions respectively comprise SEQ ID NOs: 25-27; and the V_{L}CDR1, V_{L}CDR2, and V_{L}CDR3 regions respectively comprise SEQ ID NOs: 28-30;

[0019] the V_{H}CDR1, a V_{H}CDR2, and V_{H}CDR3 regions respectively comprise SEQ ID NOs: 31-33; and the V_{L}CDR1, V_{L}CDR2, and V_{L}CDR3 regions respectively comprise SEQ ID NOs: 34-36;

[0020] the V_{H}CDR1, a V_{H}CDR2, and V_{H}CDR3 regions respectively comprise SEQ ID NOs: 37-39; and the V_{L}CDR1, V_{L}CDR2, and V_{L}CDR3 regions respectively comprise SEQ ID NOs: 40-42;

[0021] the V_{H}CDR1, a V_{H}CDR2, and V_{H}CDR3 regions respectively comprise SEQ ID NOs: 43-45; and the V_{L}CDR1, V_{L}CDR2, and V_{L}CDR3 regions respectively comprise SEQ ID NOs: 46-48;

[0022] the V_{H}CDR1, a V_{H}CDR2, and V_{H}CDR3 regions respectively comprise SEQ ID NOs: 49-51; and the V_{L}CDR1, V_{L}CDR2, and V_{L}CDR3 regions respectively comprise SEQ ID NOs: 52-54;

[0023] the V_{H}CDR1, a V_{H}CDR2, and V_{H}CDR3 regions respectively comprise SEQ ID NOs: 55-57; and the V_{L}CDR1, V_{L}CDR2, and V_{L}CDR3 regions respectively comprise SEQ ID NOs: 58-60;

[0024] the V_{H}CDR1, a V_{H}CDR2, and V_{H}CDR3 regions respectively comprise SEQ ID NOs: 61-63; and the V_{L}CDR1, V_{L}CDR2, and V_{L}CDR3 regions respectively comprise SEQ ID NOs: 64-66;

[0025] the V_{H}CDR1, a V_{H}CDR2, and V_{H}CDR3 regions respectively comprise SEQ ID NOs: 67-69; and the V_{L}CDR1, V_{L}CDR2, and V_{L}CDR3 regions respectively comprise SEQ ID NOs: 70-72;

[0026] the V_{H}CDR1, a V_{H}CDR2, and V_{H}CDR3 regions respectively comprise SEQ ID NOs: 73-75; and the V_{L}CDR1, V_{L}CDR2, and V_{L}CDR3 regions respectively comprise SEQ ID NOs: 76-78;

[0027] the V_{H}CDR1, a V_{H}CDR2, and V_{H}CDR3 regions respectively comprise SEQ ID NOs: 79-81; and the V_{L}CDR1, V_{L}CDR2, and V_{L}CDR3 regions respectively comprise SEQ ID NOs: 82-84;

[0028] the V_{H}CDR1, a V_{H}CDR2, and V_{H}CDR3 regions respectively comprise SEQ ID NOs: 85-87; and the V_{L}CDR1, V_{L}CDR2, and V_{L}CDR3 regions respectively comprise SEQ ID NOs: 88-90;

[0029] the V_{H}CDR1, a V_{H}CDR2, and V_{H}CDR3 regions respectively comprise SEQ ID NOs: 91-93; and the V_{L}CDR1, V_{L}CDR2, and V_{L}CDR3 regions respectively comprise SEQ ID NOs: 94-96;

[0030] the V_{H}CDR1, a V_{H}CDR2, and V_{H}CDR3 regions respectively comprise SEQ ID NOs: 97-99; and the V_{L}CDR1, V_{L}CDR2, and V_{L}CDR3 regions respectively comprise SEQ ID NOs: 100-102;

[0031] the V_{H}CDR1, a V_{H}CDR2, and V_{H}CDR3 regions respectively comprise SEQ ID NOs: 103-105; and the V_{L}CDR1, V_{L}CDR2, and V_{L}CDR3 regions respectively comprise SEQ ID NOs: 106-108;

[0032] the V_{H}CDR1, a V_{H}CDR2, and V_{H}CDR3 regions respectively comprise SEQ ID NOs: 109-111; and the V_{L}CDR1, V_{L}CDR2, and V_{L}CDR3 regions respectively comprise SEQ ID NOs: 112-114;

[0033] the V_{H}CDR1, a V_{H}CDR2, and V_{H}CDR3 regions respectively comprise SEQ ID NOs: 115-117; and the V_{L}CDR1, V_{L}CDR2, and V_{L}CDR3 regions respectively comprise SEQ ID NOs: 118-120;

[0034] the V_{H}CDR1, a V_{H}CDR2, and V_{H}CDR3 regions respectively comprise SEQ ID NOs: 121-123; and the V_{L}CDR1, V_{L}CDR2, and V_{L}CDR3 regions respectively comprise SEQ ID NOs: 124-126;

[0035] the V_{H}CDR1, a V_{H}CDR2, and V_{H}CDR3 regions respectively comprise SEQ ID NOs: 127-129; and the V_{L}CDR1, V_{L}CDR2, and V_{L}CDR3 regions respectively comprise SEQ ID NOs: 130-132;

[0036] the V_{H}CDR1, a V_{H}CDR2, and V_{H}CDR3 regions respectively comprise SEQ ID NOs: 133-135; and the V_{L}CDR1, V_{L}CDR2, and V_{L}CDR3 regions respectively comprise SEQ ID NOs: 136-138;

[0037] the V_{H}CDR1, a V_{H}CDR2, and V_{H}CDR3 regions respectively comprise SEQ ID NOs: 139-141; and the V_{L}CDR1, V_{L}CDR2, and V_{L}CDR3 regions respectively comprise SEQ ID NOs: 142-144;

[0038] the V_{H}CDR1, a V_{H}CDR2, and V_{H}CDR3 regions respectively comprise SEQ ID NOs: 145-147; and the V_{L}CDR1, V_{L}CDR2, and V_{L}CDR3 regions respectively comprise SEQ ID NOs: 148-150;

[0039] the V_{H}CDR1, a V_{H}CDR2, and V_{H}CDR3 regions respectively comprise SEQ ID NOs: 151-153; and the V_{L}CDR1, V_{L}CDR2, and V_{L}CDR3 regions respectively comprise SEQ ID NOs: 154-156;

[0040] the V_{H}CDR1, a V_{H}CDR2, and V_{H}CDR3 regions respectively comprise SEQ ID NOs: 157-159; and the V_{L}CDR1, V_{L}CDR2, and V_{L}CDR3 regions respectively comprise SEQ ID NOs: 160-162;

[0041] the V_{H}CDR1, a V_{H}CDR2, and V_{H}CDR3 regions respectively comprise SEQ ID NOs: 163-165; and the V_{L}CDR1, V_{L}CDR2, and V_{L}CDR3 regions respectively comprise SEQ ID NOs: 166-168;

[0042] the V_{H}CDR1, a V_{H}CDR2, and V_{H}CDR3 regions respectively comprise SEQ ID NOs: 169-171; and the V_{L}CDR1, V_{L}CDR2, and V_{L}CDR3 regions respectively comprise SEQ ID NOs: 172-174;

[0043] the V_{H}CDR1, a V_{H}CDR2, and V_{H}CDR3 regions respectively comprise SEQ ID NOs: 175-177; and the V_{L}CDR1, V_{L}CDR2, and V_{L}CDR3 regions respectively comprise SEQ ID NOs: 178-180;

[0044] the V_{H}CDR1, a V_{H}CDR2, and V_{H}CDR3 regions respectively comprise SEQ ID NOs: 181-183; and the V_{L}CDR1, V_{L}CDR2, and V_{L}CDR3 regions respectively comprise SEQ ID NOs: 184-186;

[0045] the V_{H}CDR1, a V_{H}CDR2, and V_{H}CDR3 regions respectively comprise SEQ ID NOs: 187-189; and the V_{L}CDR1, V_{L}CDR2, and V_{L}CDR3 regions respectively comprise SEQ ID NOs: 190-192;

[0046] the V_{H}CDR1, a V_{H}CDR2, and V_{H}CDR3 regions respectively comprise SEQ ID NOs: 193-195; and the V_{L}CDR1, V_{L}CDR2, and V_{L}CDR3 regions respectively comprise SEQ ID NOs: 196-198;

[0047] the V_{H}CDR1, a V_{H}CDR2, and V_{H}CDR3 regions respectively comprise SEQ ID NOs: 199-201; and the V_{L}CDR1, V_{L}CDR2, and V_{L}CDR3 regions respectively comprise SEQ ID NOs: 202-204;

[0048] the V_{H}CDR1, a V_{H}CDR2, and V_{H}CDR3 regions respectively comprise SEQ ID NOs: 205-207; and the V_{L}CDR1, V_{L}CDR2, and V_{L}CDR3 regions respectively comprise SEQ ID NOs: 208-210;

[0049] the V_{H}CDR1, a V_{H}CDR2, and V_{H}CDR3 regions respectively comprise SEQ ID NOs: 211-213; and the V_{L}CDR1, V_{L}CDR2, and V_{L}CDR3 regions respectively comprise SEQ ID NOs: 214-216;

[0050] the V_{H}CDR1, a V_{H}CDR2, and V_{H}CDR3 regions respectively comprise SEQ ID NOs: 217-219; and the V_{L}CDR1, V_{L}CDR2, and V_{L}CDR3 regions respectively comprise SEQ ID NOs: 220-222;

[0051] the V_{H}CDR1, a V_{H}CDR2, and V_{H}CDR3 regions respectively comprise SEQ ID NOs: 223-225; and the V_{L}CDR1, V_{L}CDR2, and V_{L}CDR3 regions respectively comprise SEQ ID NOs: 226-228;

[0052] the V_{H}CDR1, a V_{H}CDR2, and V_{H}CDR3 regions respectively comprise SEQ ID NOs: 229-231; and the V_{L}CDR1, V_{L}CDR2, and V_{L}CDR3 regions respectively comprise SEQ ID NOs: 232-234;

[0053] the V_{H}CDR1, a V_{H}CDR2, and V_{H}CDR3 regions respectively comprise SEQ ID NOs: 235-237; and the V_{L}CDR1, V_{L}CDR2, and V_{L}CDR3 regions respectively comprise SEQ ID NOs: 238-240;

[0054] the V_{H}CDR1, a V_{H}CDR2, and V_{H}CDR3 regions respectively comprise SEQ ID NOs: 241-243; and the V_{L}CDR1, V_{L}CDR2, and V_{L}CDR3 regions respectively comprise SEQ ID NOs: 244-246;

[0055] the V_{H}CDR1, a V_{H}CDR2, and V_{H}CDR3 regions respectively comprise SEQ ID NOs: 247-249; and the V_{L}CDR1, V_{L}CDR2, and V_{L}CDR3 regions respectively comprise SEQ ID NOs: 250-252;

[0056] the V_{H}CDR1, a V_{H}CDR2, and V_{H}CDR3 regions respectively comprise SEQ ID NOs: 253-255; and the V_{L}CDR1, V_{L}CDR2, and V_{L}CDR3 regions respectively comprise SEQ ID NOs: 256-258;

[0057] the V_{H}CDR1, a V_{H}CDR2, and V_{H}CDR3 regions respectively comprise SEQ ID NOs: 259-261; and the V_{L}CDR1, V_{L}CDR2, and V_{L}CDR3 regions respectively comprise SEQ ID NOs: 262-264;

[0058] the V_{H}CDR1, a V_{H}CDR2, and V_{H}CDR3 regions respectively comprise SEQ ID NOs: 265-267; and the V_{L}CDR1, V_{L}CDR2, and V_{L}CDR3 regions respectively comprise SEQ ID NOs: 268-270;

[0059] the V_{H}CDR1, a V_{H}CDR2, and V_{H}CDR3 regions respectively comprise SEQ ID NOs: 271-273; and the V_{L}CDR1, V_{L}CDR2, and V_{L}CDR3 regions respectively comprise SEQ ID NOs: 274-276;

[0060] the V_{H}CDR1, a V_{H}CDR2, and V_{H}CDR3 regions respectively comprise SEQ ID NOs: 277-279; and the V_{L}CDR1, V_{L}CDR2, and V_{L}CDR3 regions respectively comprise SEQ ID NOs: 280-282;

[0061] the V_{H}CDR1, a V_{H}CDR2, and V_{H}CDR3 regions respectively comprise SEQ ID NOs: 283-285; and the V_{L}CDR1, V_{L}CDR2, and V_{L}CDR3 regions respectively comprise SEQ ID NOs: 286-288;

[0062] the V_{H}CDR1, a V_{H}CDR2, and V_{H}CDR3 regions respectively comprise SEQ ID NOs: 289-291; and the V_{L}CDR1, V_{L}CDR2, and V_{L}CDR3 regions respectively comprise SEQ ID NOs: 292-294;

[0063] the V_{H}CDR1, a V_{H}CDR2, and V_{H}CDR3 regions respectively comprise SEQ ID NOs: 295-297; and the V_{L}CDR1, V_{L}CDR2, and V_{L}CDR3 regions respectively comprise SEQ ID NOs: 298-300;

[0064] the V_{H}CDR1, a V_{H}CDR2, and V_{H}CDR3 regions respectively comprise SEQ ID NOs: 301-303; and the V_{L}CDR1, V_{L}CDR2, and V_{L}CDR3 regions respectively comprise SEQ ID NOs: 304-306;

[0065] the V_{H}CDR1, a V_{H}CDR2, and V_{H}CDR3 regions respectively comprise SEQ ID NOs: 307-308; and the V_{L}CDR1, V_{L}CDR2, and V_{L}CDR3 regions respectively comprise SEQ ID NOs: 310-312;

[0066] the V_{H}CDR1, a V_{H}CDR2, and V_{H}CDR3 regions respectively comprise SEQ ID NOs: 313-315; and the V_{L}CDR1, V_{L}CDR2, and V_{L}CDR3 regions respectively comprise SEQ ID NOs: 316-318;

[0067] the V_{H}CDR1, a V_{H}CDR2, and V_{H}CDR3 regions respectively comprise SEQ ID NOs: 319-321; and the V_{L}CDR1, V_{L}CDR2, and V_{L}CDR3 regions respectively comprise SEQ ID NOs: 322-324;

[0068] the V_{H}CDR1, a V_{H}CDR2, and V_{H}CDR3 regions respectively comprise SEQ ID NOs: 325-327; and the V_{L}CDR1, V_{L}CDR2, and V_{L}CDR3 regions respectively comprise SEQ ID NOs: 328-330;

[0069] the V_{H}CDR1, a V_{H}CDR2, and V_{H}CDR3 regions respectively comprise SEQ ID NOs: 331-333; and the V_{L}CDR1, V_{L}CDR2, and V_{L}CDR3 regions respectively comprise SEQ ID NOs: 334-336;

[0070] the V_{H}CDR1, a V_{H}CDR2, and V_{H}CDR3 regions respectively comprise SEQ ID NOs: 337-339; and the V_{L}CDR1, V_{L}CDR2, and V_{L}CDR3 regions respectively comprise SEQ ID NOs: 340-342;

[0071] the V_{H}CDR1, a V_{H}CDR2, and V_{H}CDR3 regions respectively comprise SEQ ID NOs: 343-345; and the V_{L}CDR1, V_{L}CDR2, and V_{L}CDR3 regions respectively comprise SEQ ID NOs: 346-348;

[0072] the V_{H}CDR1, a V_{H}CDR2, and V_{H}CDR3 regions respectively comprise SEQ ID NOs: 349-351; and the V_{L}CDR1, V_{L}CDR2, and V_{L}CDR3 regions respectively comprise SEQ ID NOs: 352-354;

[0073] the V_{H}CDR1, a V_{H}CDR2, and V_{H}CDR3 regions respectively comprise SEQ ID NOs: 355-357; and the V_{L}CDR1, V_{L}CDR2, and V_{L}CDR3 regions respectively comprise SEQ ID NOs: 358-360;

[0074] the V_{H}CDR1, a V_{H}CDR2, and V_{H}CDR3 regions respectively comprise SEQ ID NOs: 361-363; and the V_{L}CDR1, V_{L}CDR2, and V_{L}CDR3 regions respectively comprise SEQ ID NOs: 364-366;

[0075] the V_{H}CDR1, a V_{H}CDR2, and V_{H}CDR3 regions respectively comprise SEQ ID NOs: 367-369; and the V_{L}CDR1, V_{L}CDR2, and V_{L}CDR3 regions respectively comprise SEQ ID NOs: 370-372;

[0076] the V_{H}CDR1, a V_{H}CDR2, and V_{H}CDR3 regions respectively comprise SEQ ID NOs: 373-375; and the V_{L}CDR1, V_{L}CDR2, and V_{L}CDR3 regions respectively comprise SEQ ID NOs: 376-378;

[0077] the V_{H}CDR1, a V_{H}CDR2, and V_{H}CDR3 regions respectively comprise SEQ ID NOs: 379-381; and the V_{L}CDR1, V_{L}CDR2, and V_{L}CDR3 regions respectively comprise SEQ ID NOs: 382-384;

[0078] the V_{H}CDR1, a V_{H}CDR2, and V_{H}CDR3 regions respectively comprise SEQ ID NOs: 385-387; and the V_{L}CDR1, V_{L}CDR2, and V_{L}CDR3 regions respectively comprise SEQ ID NOs: 388-390;

[0079] the V_{H}CDR1, a V_{H}CDR2, and V_{H}CDR3 regions respectively comprise SEQ ID NOs: 391-393; and the V_{L}CDR1, V_{L}CDR2, and V_{L}CDR3 regions respectively comprise SEQ ID NOs: 394-396;

[0080] the V_{H}CDR1, a V_{H}CDR2, and V_{H}CDR3 regions respectively comprise SEQ ID NOs: 397-399; and the V_{L}CDR1, V_{L}CDR2, and V_{L}CDR3 regions respectively comprise SEQ ID NOs: 400-402;

[0081] the V_{H}CDR1, a V_{H}CDR2, and V_{H}CDR3 regions respectively comprise SEQ ID NOs: 403-405; and the V_{L}CDR1, V_{L}CDR2, and V_{L}CDR3 regions respectively comprise SEQ ID NOs: 406-408;

[0082] the V_{H}CDR1, a V_{H}CDR2, and V_{H}CDR3 regions respectively comprise SEQ ID NOs: 409-411; and the V_{L}CDR1, V_{L}CDR2, and V_{L}CDR3 regions respectively comprise SEQ ID NOs: 412-414;

[0083] the V_{H}CDR1, a V_{H}CDR2, and V_{H}CDR3 regions respectively comprise SEQ ID NOs: 415-417; and the V_{L}CDR1, V_{L}CDR2, and V_{L}CDR3 regions respectively comprise SEQ ID NOs: 418-420;

[0084] the V_{H}CDR1, a V_{H}CDR2, and V_{H}CDR3 regions respectively comprise SEQ ID NOs: 421-423; and the V_{L}CDR1, V_{L}CDR2, and V_{L}CDR3 regions respectively comprise SEQ ID NOs: 424-426;

[0085] the V_{H}CDR1, a V_{H}CDR2, and V_{H}CDR3 regions respectively comprise SEQ ID NOs: 427-429; and the V_{L}CDR1, V_{L}CDR2, and V_{L}CDR3 regions respectively comprise SEQ ID NOs: 430-432;

[0086] the V_{H}CDR1, a V_{H}CDR2, and V_{H}CDR3 regions respectively comprise SEQ ID NOs: 433-435; and the V_{L}CDR1, V_{L}CDR2, and V_{L}CDR3 regions respectively comprise SEQ ID NOs: 436-438;

[0087] the V_{H}CDR1, a V_{H}CDR2, and V_{H}CDR3 regions respectively comprise SEQ ID NOs: 439-441; and the V_{L}CDR1, V_{L}CDR2, and V_{L}CDR3 regions respectively comprise SEQ ID NOs: 442-444;

[0088] the V_{H}CDR1, a V_{H}CDR2, and V_{H}CDR3 regions respectively comprise SEQ ID NOs: 445-447; and the V_{L}CDR1, V_{L}CDR2, and V_{L}CDR3 regions respectively comprise SEQ ID NOs: 448-450;

[0089] the V_{H}CDR1, a V_{H}CDR2, and V_{H}CDR3 regions respectively comprise SEQ ID NOs: 451-453; and the V_{L}CDR1, V_{L}CDR2, and V_{L}CDR3 regions respectively comprise SEQ ID NOs: 454-456;

[0090] the V_{H}CDR1, a V_{H}CDR2, and V_{H}CDR3 regions respectively comprise SEQ ID NOs: 457-459; and the V_{L}CDR1, V_{L}CDR2, and V_{L}CDR3 regions respectively comprise SEQ ID NOs: 460-462;

[0091] the V_{H}CDR1, a V_{H}CDR2, and V_{H}CDR3 regions respectively comprise SEQ ID NOs: 463-465; and the V_{L}CDR1, V_{L}CDR2, and V_{L}CDR3 regions respectively comprise SEQ ID NOs: 466-468;

[0092] the V_{H}CDR1, a V_{H}CDR2, and V_{H}CDR3 regions respectively comprise SEQ ID NOs: 469-471; and the V_{L}CDR1, V_{L}CDR2, and V_{L}CDR3 regions respectively comprise SEQ ID NOs: 472-474;

[0093] the V_{H}CDR1, a V_{H}CDR2, and V_{H}CDR3 regions respectively comprise SEQ ID NOs: 475-477; and the V_{L}CDR1, V_{L}CDR2, and V_{L}CDR3 regions respectively comprise SEQ ID NOs: 478-480;

[0094] the V_{H}CDR1, a V_{H}CDR2, and V_{H}CDR3 regions respectively comprise SEQ ID NOs: 481-483; and the V_{L}CDR1, V_{L}CDR2, and V_{L}CDR3 regions respectively comprise SEQ ID NOs: 484-486;

[0095] the V_{H}CDR1, a V_{H}CDR2, and V_{H}CDR3 regions respectively comprise SEQ ID NOs: 487-489; and the V_{L}CDR1, V_{L}CDR2, and V_{L}CDR3 regions respectively comprise SEQ ID NOs: 490-492;

[0096] the V_{H}CDR1, a V_{H}CDR2, and V_{H}CDR3 regions respectively comprise SEQ ID NOs: 493-495; and the V_{L}CDR1, V_{L}CDR2, and V_{L}CDR3 regions respectively comprise SEQ ID NOs: 496-498;

[0097] the V_{H}CDR1, a V_{H}CDR2, and V_{H}CDR3 regions respectively comprise SEQ ID NOs: 499-501; and the V_{L}CDR1, V_{L}CDR2, and V_{L}CDR3 regions respectively comprise SEQ ID NOs: 502-504;

[0098] the V_{H}CDR1, a V_{H}CDR2, and V_{H}CDR3 regions respectively comprise SEQ ID NOs: 505-507; and the V_{L}CDR1, V_{L}CDR2, and V_{L}CDR3 regions respectively comprise SEQ ID NOs: 508-510;

[0099] the V_{H}CDR1, a V_{H}CDR2, and V_{H}CDR3 regions respectively comprise SEQ ID NOs: 511-513; and the V_{L}CDR1, V_{L}CDR2, and V_{L}CDR3 regions respectively comprise SEQ ID NOs: 514-516;

[0100] the V_{H}CDR1, a V_{H}CDR2, and V_{H}CDR3 regions respectively comprise SEQ ID NOs: 517-519; and the V_{L}CDR1, V_{L}CDR2, and V_{L}CDR3 regions respectively comprise SEQ ID NOs: 520-522;

[0101] the V_{H}CDR1, a V_{H}CDR2, and V_{H}CDR3 regions respectively comprise SEQ ID NOs: 523-525; and the V_{L}CDR1, V_{L}CDR2, and V_{L}CDR3 regions respectively comprise SEQ ID NOs: 526-528;

[0102] the V_{H}CDR1, a V_{H}CDR2, and V_{H}CDR3 regions respectively comprise SEQ ID NOs: 529-531; and the V_{L}CDR1, V_{L}CDR2, and V_{L}CDR3 regions respectively comprise SEQ ID NOs: 532-534;

[0103] the V_{H}CDR1, a V_{H}CDR2, and V_{H}CDR3 regions respectively comprise SEQ ID NOs: 535-537; and the V_{L}CDR1, V_{L}CDR2, and V_{L}CDR3 regions respectively comprise SEQ ID NOs: 538-540;

[0104] the V_{H}CDR1, a V_{H}CDR2, and V_{H}CDR3 regions respectively comprise SEQ ID NOs: 541-543; and the V_{L}CDR1, V_{L}CDR2, and V_{L}CDR3 regions respectively comprise SEQ ID NOs: 544-546;

[0105] the V_{H}CDR1, a V_{H}CDR2, and V_{H}CDR3 regions respectively comprise SEQ ID NOs: 547-549; and the V_{L}CDR1, V_{L}CDR2, and V_{L}CDR3 regions respectively comprise SEQ ID NOs: 550-552;

[0106] the V_{H}CDR1, a V_{H}CDR2, and V_{H}CDR3 regions respectively comprise SEQ ID NOs: 553-555; and the V_{L}CDR1, V_{L}CDR2, and V_{L}CDR3 regions respectively comprise SEQ ID NOs: 556-558;

[0107] the V_{H}CDR1, a V_{H}CDR2, and V_{H}CDR3 regions respectively comprise SEQ ID NOs: 559-561; and the V_{L}CDR1, V_{L}CDR2, and V_{L}CDR3 regions respectively comprise SEQ ID NOs: 562-564;

[0108] the V_{H}CDR1, a V_{H}CDR2, and V_{H}CDR3 regions respectively comprise SEQ ID NOs: 565-567; and the V_{L}CDR1, V_{L}CDR2, and V_{L}CDR3 regions respectively comprise SEQ ID NOs: 568-570;

[0109] the V_{H}CDR1, a V_{H}CDR2, and V_{H}CDR3 regions respectively comprise SEQ ID NOs: 571-573; and the V_{L}CDR1, V_{L}CDR2, and V_{L}CDR3 regions respectively comprise SEQ ID NOs: 574-576;

[0110] the V_{H}CDR1, a V_{H}CDR2, and V_{H}CDR3 regions respectively comprise SEQ ID NOs: 577-579; and the V_{L}CDR1, V_{L}CDR2, and V_{L}CDR3 regions respectively comprise SEQ ID NOs: 580-582;

[0111] the V_{H}CDR1, a V_{H}CDR2, and V_{H}CDR3 regions respectively comprise SEQ ID NOs: 583-585; and the V_{L}CDR1, V_{L}CDR2, and V_{L}CDR3 regions respectively comprise SEQ ID NOs: 586-588;

[0112] the V_{H}CDR1, a V_{H}CDR2, and V_{H}CDR3 regions respectively comprise SEQ ID NOs: 589-591; and the V_{L}CDR1, V_{L}CDR2, and V_{L}CDR3 regions respectively comprise SEQ ID NOs: 592-594;

[0113] the V_{H}CDR1, a V_{H}CDR2, and V_{H}CDR3 regions respectively comprise SEQ ID NOs: 595-597; and the V_{L}CDR1, V_{L}CDR2, and V_{L}CDR3 regions respectively comprise SEQ ID NOs: 598-600;

[0114] the V_{H}CDR1, a V_{H}CDR2, and V_{H}CDR3 regions respectively comprise SEQ ID NOs: 601-603; and the V_{L}CDR1, V_{L}CDR2, and V_{L}CDR3 regions respectively comprise SEQ ID NOs: 604-606;

[0115] the V_{H}CDR1, a V_{H}CDR2, and V_{H}CDR3 regions respectively comprise SEQ ID NOs: 607-609; and the V_{L}CDR1, V_{L}CDR2, and V_{L}CDR3 regions respectively comprise SEQ ID NOs: 610-612;

[0116] the V_{H}CDR1, a V_{H}CDR2, and V_{H}CDR3 regions respectively comprise SEQ ID NOs: 613-615; and the V_{L}CDR1, V_{L}CDR2, and V_{L}CDR3 regions respectively comprise SEQ ID NOs: 616-618;

[0117] the V_{H}CDR1, a V_{H}CDR2, and V_{H}CDR3 regions respectively comprise SEQ ID NOs: 619-621; and the V_{L}CDR1, V_{L}CDR2, and V_{L}CDR3 regions respectively comprise SEQ ID NOs: 622-624;

[0118] the V_{H}CDR1, a V_{H}CDR2, and V_{H}CDR3 regions respectively comprise SEQ ID NOs: 625-627; and the V_{L}CDR1, V_{L}CDR2, and V_{L}CDR3 regions respectively comprise SEQ ID NOs: 628-630;

[0119] the V_{H}CDR1, a V_{H}CDR2, and V_{H}CDR3 regions respectively comprise SEQ ID NOs: 631-633; and the V_{L}CDR1, V_{L}CDR2, and V_{L}CDR3 regions respectively comprise SEQ ID NOs: 634-636;

[0120] the V_{H}CDR1, a V_{H}CDR2, and V_{H}CDR3 regions respectively comprise SEQ ID NOs: 637-639; and the V_{L}CDR1, V_{L}CDR2, and V_{L}CDR3 regions respectively comprise SEQ ID NOs: 640-642;

[0121] the V_{H}CDR1, a V_{H}CDR2, and V_{H}CDR3 regions respectively comprise SEQ ID NOs: 643-645; and the V_{L}CDR1, V_{L}CDR2, and V_{L}CDR3 regions respectively comprise SEQ ID NOs: 646-648;

[0122] the V_{H}CDR1, a V_{H}CDR2, and V_{H}CDR3 regions respectively comprise SEQ ID NOs: 649-651; and the V_{L}CDR1, V_{L}CDR2, and V_{L}CDR3 regions respectively comprise SEQ ID NOs: 652-654;

[0123] the V_{H}CDR1, a V_{H}CDR2, and V_{H}CDR3 regions respectively comprise SEQ ID NOs: 655-657; and the V_{L}CDR1, V_{L}CDR2, and V_{L}CDR3 regions respectively comprise SEQ ID NOs: 658-660;

[0124] the V_{H}CDR1, a V_{H}CDR2, and V_{H}CDR3 regions respectively comprise SEQ ID NOs: 661-663; and the V_{L}CDR1, V_{L}CDR2, and V_{L}CDR3 regions respectively comprise SEQ ID NOs: 664-666;

[0125] the V_{H}CDR1, a V_{H}CDR2, and V_{H}CDR3 regions respectively comprise SEQ ID NOs: 667-669; and the V_{L}CDR1, V_{L}CDR2, and V_{L}CDR3 regions respectively comprise SEQ ID NOs: 670-672;

[0126] the V_{H}CDR1, a V_{H}CDR2, and V_{H}CDR3 regions respectively comprise SEQ ID NOs: 673-675; and the V_{L}CDR1, V_{L}CDR2, and V_{L}CDR3 regions respectively comprise SEQ ID NOs: 676-678;

[0127] the V_{H}CDR1, a V_{H}CDR2, and V_{H}CDR3 regions respectively comprise SEQ ID NOs: 679-681; and the V_{L}CDR1, V_{L}CDR2, and V_{L}CDR3 regions respectively comprise SEQ ID NOs: 682-684;

[0128] the V_{H}CDR1, a V_{H}CDR2, and V_{H}CDR3 regions respectively comprise SEQ ID NOs: 685-687; and the V_{L}CDR1, V_{L}CDR2, and V_{L}CDR3 regions respectively comprise SEQ ID NOs: 688-690;

[0129] the V_{H}CDR1, a V_{H}CDR2, and V_{H}CDR3 regions respectively comprise SEQ ID NOs: 691-693; and the V_{L}CDR1, V_{L}CDR2, and V_{L}CDR3 regions respectively comprise SEQ ID NOs: 694-696;

[0130] the V_{H}CDR1, a V_{H}CDR2, and V_{H}CDR3 regions respectively comprise SEQ ID NOs: 697-699; and the V_{L}CDR1, V_{L}CDR2, and V_{L}CDR3 regions respectively comprise SEQ ID NOs: 700-702;

[0131] the V_{H}CDR1, a V_{H}CDR2, and V_{H}CDR3 regions respectively comprise SEQ ID NOs: 703-705; and the V_{L}CDR1, V_{L}CDR2, and V_{L}CDR3 regions respectively comprise SEQ ID NOs: 706-708;

[0132] the V_{H}CDR1, a V_{H}CDR2, and V_{H}CDR3 regions respectively comprise SEQ ID NOs: 709-711; and the V_{L}CDR1, V_{L}CDR2, and V_{L}CDR3 regions respectively comprise SEQ ID NOs: 712-714;

[0133] the V_{H}CDR1, a V_{H}CDR2, and V_{H}CDR3 regions respectively comprise SEQ ID NOs: 715-717; and the V_{L}CDR1, V_{L}CDR2, and V_{L}CDR3 regions respectively comprise SEQ ID NOs: 718-720;

[0134] the V_{H}CDR1, a V_{H}CDR2, and V_{H}CDR3 regions respectively comprise SEQ ID NOs: 721-723; and the V_{L}CDR1, V_{L}CDR2, and V_{L}CDR3 regions respectively comprise SEQ ID NOs: 724-726;

[0135] the V_{H}CDR1, a V_{H}CDR2, and V_{H}CDR3 regions respectively comprise SEQ ID NOs: 727-729; and the V_{L}CDR1, V_{L}CDR2, and V_{L}CDR3 regions respectively comprise SEQ ID NOs: 730-732;

[0136] the V_{H}CDR1, a V_{H}CDR2, and V_{H}CDR3 regions respectively comprise SEQ ID NOs: 733-735; and the V_{L}CDR1, V_{L}CDR2, and V_{L}CDR3 regions respectively comprise SEQ ID NOs: 736-738;

[0137] the V_{H}CDR1, a V_{H}CDR2, and V_{H}CDR3 regions respectively comprise SEQ ID NOs: 739-741; and the V_{L}CDR1, V_{L}CDR2, and V_{L}CDR3 regions respectively comprise SEQ ID NOs: 742-744; or

[0138] the V_{H}CDR1, a V_{H}CDR2, and V_{H}CDR3 regions respectively comprise SEQ ID NOs: 745-747; and the V_{L}CDR1, V_{L}CDR2, and V_{L}CDR3 regions respectively comprise SEQ ID NOs: 748-750.

[0139] In some embodiments, the heavy chain is at least 80, 85, 90, 95, 97, 98, 99, or 100% identical to a sequence selected from Table A2, optionally wherein the heavy chain has 1, 2, 3, 4, 5, or 6 alterations in the framework regions. In some embodiments, the light chain is at least 80, 85, 90, 95, 97, 98, 99, or 100% identical to a sequence selected from Table A2, optionally wherein the light chain has 1, 2, 3, 4, 5, or 6 alterations in the framework regions.

[0140] In some embodiments:

[0141] the heavy chain comprises a sequence at least 80, 85, 90, 95, 97, 98, 99, or 100% identical to SEQ ID NO: 751, 753, 755, 757, 759, 761, 763, 765, 767, 769, 771, 773, 775, 777, 779, 781, 783, 785, 787, 789, 791, 793, 795, 797, 799, 801, 803, 805, 807, 809, 811, 813, 815, 817, 819, 821, 823, 825, 827, 829, 831, 833, 835, 837, 839, 841, 843, 845, 847, 849, 851, 853, 855, 857, 859, 861, 863, 865, 867, 869, 871, 873, 875, 877, 879, 881, 883, 885, 887, 889, 891, 893, 895, 897, 899, 901, 903, 905, 907, 909, 911, 913, 915, 917, 919, 921, 923, 925, 927, 929, 931, 933, 935, 937, 939, 941, 943, 945, 947, 949, 951, 953, 955, 957, 959, 961, 963, 965, 967, 969, 971, 973, 975, 977, 979, 981, 983, 985, 987, 989, 991, 993, 995, 997, 999, 1001, 1003, or 1005;

[0142] and the light chain respectively comprises a sequence at least 80, 85, 90, 95, 97, 98, 99, or 100% identical to SEQ ID NO: 752, 754, 756, 758, 760, 762, 764, 766, 768, 770, 772, 774, 776, 778, 780, 782, 784, 786, 788, 790, 792, 794, 796, 798, 800, 802, 804, 806, 808, 810, 812, 814, 816, 818, 820, 822, 824, 826, 828, 830, 832, 834, 836, 838, 840, 842, 844, 846, 848, 850, 852, 854, 856, 858, 860, 862, 864, 866, 868, 870, 872, 874, 876, 878, 880, 882, 884, 886, 888, 890, 892, 894, 896, 898, 900, 902, 904, 906, 908, 910, 912, 914, 916, 918, 920, 922, 924, 926, 928, 930, 932, 934, 936, 938, 940, 942, 944, 946, 948, 950, 952, 954, 956, 958, 960, 962, 964, 966, 968, 970, 972, 974, 976, 978, 980, 982, 984, 986, 988, 990, 992, 994, 996, 998, 1000, 1002, 1004, or 1006.

[0143] In some embodiments, the isolated antibody, or an antigen-binding fragment thereof, specifically binds to human FAP and human B7H3 with comparable binding affinities, for example, wherein the binding affinities for FAP and B7H3 are about or less than about 1.5, 2, 3, 4, 5, 6, 7, 8, 9, 10, or 20-fold relative to each other. In some embodiments, the isolated antibody, or an antigen-binding fragment thereof, binds to cell surface-expressed human FAP, and optionally cell surface-expressed human B7H3. In some embodiments, the isolated antibody, or an antigen-binding fragment thereof, specifically binds to at least one human FAP peptide epitope selected from Table T1, and which optionally specifically binds to at least one human B7H3 peptide epitope selected from Table T2. In some embodiments, the isolated antibody, or an antigen-binding fragment thereof, is a monoclonal antibody and/or a humanized antibody, or an antigen-binding fragment thereof. In some embodiments, the isolated antibody, or an antigen-binding fragment thereof, is a whole antibody, a fragment antigen-binding domain (Fab), a F(ab′)2 domain, a single-chain variable fragment (scFv), a dimeric single-chain variable fragment (di-scFv), a single domain antibody (sdAb), or a bi-specific or multi-specific antibody.

[0144] In some embodiments, the isolated antibody, or an antigen-binding fragment thereof, comprises an Fc region selected from an IgA (including subclasses IgA1 and IgA2), IgD, IgE, IgG (including subclasses IgG1, IgG2, IgG3, and IgG4), and IgM Fc region, optionally a human Fc region, including hybrids and variants thereof. In some embodiments, the isolated antibody, or an antigen-binding fragment thereof, comprises an IgG Fc region with high effector function in humans, optionally an IgG1 Fc region or an IgG3 Fc region. In some embodiments, the isolated antibody, or an antigen-binding fragment thereof, comprises an IgG Fc region with low effector function in humans, optionally an IgG2 Fc region or an IgG4 Fc region. In some embodiments, the isolated antibody, or an antigen-binding fragment thereof, comprises a modified Fc region which has at least one altered effector function and/or pharmacokinetic (PK) characteristic relative to a wild-type Fc region.

[0145] In some embodiments, the isolated antibody, or an antigen-binding fragment thereof, specifically binds to the human FAP with a K_{D} of 0.4 nM or lower, and which specifically binds to the human B7H3 protein with a K_{D} of 0.4 nM or lower.

[0146] In some embodiments, the isolated antibody, or an antigen-binding fragment thereof, is a bi-specific or multi-specific antibody, comprising a first anti-FAP and/or antiB7H3 Fab region as described herein, and a second Fab region that specifically binds to an additional antigen, for example, a cell surface antigen/receptor expressed on an immune cell or cancer cell, such as CD3.

[0147] In some embodiments, the isolated antibody, or an antigen-binding fragment thereof, is fused via an optional linker to a heterologous effector domain. In some embodiments, the heterologous effector domain comprises an immune cell-stimulatory ligand or domain, an immune cell-inhibitory ligand or domain, or a cytocidal (e.g., tumor cell cytocidal) ligand or domain, optionally selected from interleukin-2 (IL-2), interleukin-15 (IL-15), hybrid IL-2/IL-15, and a TNF superfamily ligand such as TRAIL, 4-1BBL, interleukin-21 (IL-21), IFN-alpha, IFN-beta, CD40, GITR-L, OX40L, and CD70.

[0148] In some embodiments, the isolated antibody, or an antigen-binding fragment thereof, is a single-chain variable fragment (scFv) fused via a spacer (hinge) region to a transmembrane domain and an intracellular T-cell signaling domain, to form a chimeric antigen receptor (CAR).

[0149] Also included are isolated polynucleotides encoding an isolated antibody, or antigen-binding fragment thereof, described herein, an expression vector comprising the isolated polynucleotide, or an isolated host cell comprising the vector. Also included are methods of producing an antibody, or an antigen-binding fragment thereof, as described herein, comprising culturing the host cell under culture conditions suitable for the expression of the antibody, or antigen-binding fragment thereof, and isolating the antibody, or antigen-binding fragment thereof, from the culture.

[0150] Some embodiments include a chimeric antigen receptor (CAR) T cell, comprising a CAR described herein.

[0151] Certain embodiments include a pharmaceutical composition, comprising a physiologically acceptable carrier and an antibody, or antigen-binding fragment thereof, or a CAR T cell, as described herein.

[0152] Certain embodiments include a method for treating a disease in a subject in need thereof, comprising administering to the subject the pharmaceutical composition, as described herein. In some embodiments, the disease is a cancer. In some embodiments, the subject has, or is selected for treatment based on having, a cancer associated with increased or aberrant FAP expression. In some embodiments, the subject has, or is selected for treatment based on having, a cancer associated with increased or aberrant B7H3 expression. In some embodiments, the cancer is a primary cancer or a metastatic cancer, and is selected from one or more of melanoma (optionally metastatic melanoma), kidney cancer (optionally renal cell carcinoma), pancreatic cancer, bone cancer, prostate cancer, small cell lung cancer, non-small cell lung cancer (NSCLC), mesothelioma, leukemia (optionally lymphocytic leukemia, chronic myelogenous leukemia, acute myeloid leukemia, or relapsed acute myeloid leukemia), multiple myeloma, lymphoma, hepatoma (hepatocellular carcinoma), sarcoma, B-cell malignancy, breast cancer, ovarian cancer, colorectal cancer, glioma, glioblastoma multiforme, meningioma, pituitary adenoma, vestibular schwannoma, primary CNS lymphoma, primitive neuroectodermal tumor (medulloblastoma), bladder cancer, uterine cancer, esophageal cancer, brain cancer, head and neck cancers, cervical cancer, testicular cancer, thyroid cancer, and stomach cancer.

[0153] In some embodiments, the metastatic cancer is selected from one or more of:

[0154] (a) a bladder cancer which has metastasized to the bone, liver, and/or lungs;

[0155] (b) a breast cancer which has metastasized to the bone, brain, liver, and/or lungs;

[0156] (c) a colorectal cancer which has metastasized to the liver, lungs, and/or peritoneum;

[0157] (d) a kidney cancer which has metastasized to the adrenal glands, bone, brain, liver, and/or lungs;

[0158] (e) a lung cancer which has metastasized to the adrenal glands, bone, brain, liver, and/or other lung sites;

[0159] a melanoma which has metastasized to the bone, brain, liver, lung, and/or skin/muscle;

[0160] (g) a ovarian cancer which has metastasized to the liver, lung, and/or peritoneum;

[0161] (h) a pancreatic cancer which has metastasized to the liver, lung, and/or peritoneum;

[0162] (i) a prostate cancer which has metastasized to the adrenal glands, bone, liver, and/or lungs;

[0163] (j) a stomach cancer which has metastasized to the liver, lung, and/or peritoneum;

[0164] (l) a thyroid cancer which has metastasized to the bone, liver, and/or lungs; and

[0165] (m) a uterine cancer which has metastasized to the bone, liver, lung, peritoneum, and/or vagina.

[0166] In some embodiments, the antibody, or antigen-binding fragment thereof, enhances an immune response to the cancer by about, or at least about, 5, 10, 15, 20, 25, 30, 35, 40, 45, 50, 60, 70, 80, 90, 100, 200, 300, 400, 500, 600, 700, 800, 900, 1000, 2000% or more, relative to a control. In some embodiments, the antibody, or antigen-binding fragment thereof, increases cancer cell killing in the subject by about or at least about 5, 10, 15, 20, 25, 30, 35, 40, 45, 50, 60, 70, 80, 90, 100, 200, 300, 400, 500, 600, 700, 800, 900, 1000, 2000% or more relative to an untreated control. In some embodiments, the antibody, or antigen-binding fragment thereof, reduces invasiveness of the cancer by about or at least about 5, 10, 15, 20, 25, 30, 35, 40, 45, 50, 60, 70, 80, 90, 100, 200, 300, 400, 500, 600, 700, 800, 900, 1000, 2000% or more relative to an untreated control.

[0167] Certain embodiments include administering to the subject in need thereof an additional agent selected from one or more of a cancer immunotherapy agent, a chemotherapeutic agent, a hormonal therapeutic agent, and a kinase inhibitor. In some embodiments, the antibody, or antigen-binding fragment thereof, and the additional agent are administered separately, as separate compositions. In some embodiments, the antibody, or antigen-binding fragment thereof, and the additional are administered together as part of the same pharmaceutical composition. In some embodiments, the antibody, or antigen-binding fragment thereof, enhances susceptibility of the cancer to the additional agent by about or at least about 5, 10, 15, 20, 25, 30, 35, 40, 45, 50, 60, 70, 80, 90, 100, 200, 300, 400, 500, 600, 700, 800, 900, 1000, 2000% or more relative to the additional agent alone.

[0168] Some embodiments include administering the pharmaceutical composition to the subject by parenteral administration. In some embodiments, the parenteral administration is intravenous administration.

[0169] Certain embodiments include the use of a pharmaceutical composition as described herein in the preparation of a medicament for treating a disease in a subject, optionally wherein the disease is a cancer, optionally wherein the cancer is associated with increased or aberrant FAP and/or B7H3 expression. Also included is pharmaceutical composition as described herein for use in treating a disease in a subject, optionally wherein the disease is a cancer, optionally wherein the cancer is associated with increased or aberrant FAP and/or B7H3 expression.

### BRIEF DESCRIPTION OF THE DRAWINGS

[0170] FIG. 1 illustrates a “dual action” fragment antigen binding (Fab) region that specifically binds to human fibroblast activation protein (FAP) or human CD276 (B7H3), but not both simultaneously, at the same or substantially the same paratope.

[0171] FIG. 2 illustrates a “dual action” whole antibody that specifically binds to human FAP and human B7H3 at each of its separate but otherwise identical Fab regions. It is also possible that each of the two Fab regions bind only to FAP or only to B7H3.

[0172] FIG. 3 illustrates a bi-specific or multi-specific version of a “dual action” antibody, where one Fab region specifically binds to human FAP or human B7H3 at the same or substantially the same paratope, and the other Fab region specifically binds to a third antigen, including a cell surface antigen such as CD3 (depicted) expressed on T cells, NK cells, DCs, macrophages, or tumor cells.

[0173] FIGS. 4A-4F illustrate the fusion (4A-4E) or chemical conjugation (4F) of a “dual action” Fab or whole antibody to one or more heterologous effector domains or other molecules, such as small molecule toxins, proteinacous toxins, DNA or RNA molecules, or aptamers.

[0174] FIG. 5 illustrates a chimeric antigen receptor (CAR) composed of a “dual action” scFv region that specifically binds to human FAP or B7H3 at the same or substantially the same paratope.

[0175] FIGS. 6A-6C show reduced SDS-PAGE analysis of Expi293 expression supernatant (6A), non-reduced SDS-PAGE analysis (6B), and reduced SDS-PAGE analysis (6C) of purified antibodies. “M” on the figures represents the protein standard marker.

[0176] FIGS. 7A-7F illustrate representative HPLC analysis results of exemplary antibodies purified using protein affinity chromatography.

[0177] FIGS. 8A-8L show dose dependent binding activity and specificity of Expi293 expression supernatant against human FAPα protein.

[0178] FIGS. 9A-9Q show dose dependent binding activity and specificity of Expi293 expression supernatant against human FAPα (9A-9O), cyno FAPα (9P) and mouse FAPα (9Q).

[0179] FIGS. 10A-10Q show dose dependent binding activity and specificity of Expi293 expression supernatant against human B7H3-L.

[0180] FIGS. 11A-11R show dose dependent binding activity and specificity of Expi293 expression supernatant against human B7H3-S.

[0181] FIGS. 12A-12L show dose dependent binding activity and specificity of Expi293 expression supernatant against cyno B7H3-L (12A-12F) and cyno B7H3-S (12G-12L).

[0182] FIGS. 13A-13F show dose dependent binding activity and specificity of Expi293 expression supernatant against mouse B7H3-S.

[0183] FIGS. 14A-14N show dose dependent binding activity of purified antibodies against human FAPα (14A-14E), human B7H3-L (14F-14J), human B7H3-S (14K), cyno B7H3-L (14L), cyno B7H3-S (14M), and mouse B7H3-S (14N).

[0184] FIGS. 15A-15I show FACS binding of purified antibodies to cells expressing FAP or B7H3.

[0185] FIGS. 16A-16I show FACS binding of Expi293F expression supernatant to cells expressing FAP or B7H3.

[0186] FIGS. 17A-17I show FACS binding of purified antibodies to cells expressing FAP or B7H3.

[0187] FIGS. 18A-18L shows the amino acid sequence of variable region of exemplary antibodies. FIGS. 18A, 18C, 18D, 18G, 18I, 18J, 18K, and 18L show the alignment of heavy chain variable region sequences. FIGS. 18B, 18E, 18F, and 18H show the alignment of light chain variable region sequences.

### DETAILED DESCRIPTION

[0188] The present disclosure relates to antibodies, and antigen-binding fragments thereof, which specifically bind to fibroblast activation protein (FAP), and “dual-action” antibodies, including those having dual binding specificity for FAP and human CD276 (B7H3) at the same or substantially the same paratope, and related pharmaceutical compositions, cells, and methods of use thereof. The antibodies, and antigen-binding fragments thereof, of the present disclosure, can find utility as standalone therapeutic, diagnostic, or research agents, or as part of a fusion protein or chimeric antigen receptor, as described herein.

[0189] Unless defined otherwise, all technical and scientific terms used herein have the same meaning as commonly understood by those of ordinary skill in the art to which the disclosure belongs. Although any methods, materials, compositions, reagents, cells, similar or equivalent similar or equivalent to those described herein can be used in the practice or testing of the subject matter of the present disclosure, preferred methods and materials are described. All publications and references, including but not limited to patents and patent applications, cited in this specification are herein incorporated by reference in their entirety as if each individual publication or reference were specifically and individually indicated to be incorporated by reference herein as being fully set forth. Any patent application to which this application claims priority is also incorporated by reference herein in its entirety in the manner described above for publications and references.

[0190] Standard techniques may be used for recombinant DNA, oligonucleotide synthesis, and tissue culture and transformation (e.g., electroporation, lipofection). Enzymatic reactions and purification techniques may be performed according to manufacturer's specifications or as commonly accomplished in the art or as described herein. These and related techniques and procedures may be generally performed according to conventional methods well known in the art and as described in various general and more specific references that are cited and discussed throughout the present specification. Unless specific definitions are provided, the nomenclature utilized in connection with, and the laboratory procedures and techniques of, molecular biology, analytical chemistry, synthetic organic chemistry, and medicinal and pharmaceutical chemistry described herein are those well-known and commonly used in the art. Standard techniques may be used for recombinant technology, molecular biological, microbiological, chemical syntheses, chemical analyses, pharmaceutical preparation, formulation, and delivery, and treatment of patients.

[0191] For the purposes of the present disclosure, the following terms are defined below.

[0192] The articles “a” and “an” are used herein to refer to one or to more than one (i.e., to at least one) of the grammatical object of the article. By way of example, “an element” includes “one element”, “one or more elements” and/or “at least one element”.

[0193] By “about” is meant a quantity, level, value, number, frequency, percentage, dimension, size, amount, weight or length that varies by as much as 30, 25, 20, 15, 10, 9, 8, 7, 6, 5, 4, 3, 2 or 1% to a reference quantity, level, value, number, frequency, percentage, dimension, size, amount, weight or length.

[0194] An “antagonist” refers to biological structure (e.g., antibody) or chemical agent that interferes with or otherwise reduces the physiological action of another agent or molecule. In some instances, the antagonist specifically binds to the other agent or molecule. Included are full and partial antagonists.

[0195] An “agonist” refers to biological structure (e.g., antibody) or chemical agent that increases or enhances the physiological action of another agent or molecule. In some instances, the agonist specifically binds to the other agent or molecule. Included are full and partial agonists.

[0196] As used herein, the term “amino acid” is intended to mean both naturally occurring and non-naturally occurring amino acids as well as amino acid analogs and mimetics. Naturally-occurring amino acids include the 20 (L)-amino acids utilized during protein biosynthesis as well as others such as 4-hydroxyproline, hydroxylysine, desmosine, isodesmosine, homocysteine, citrulline and ornithine, for example. Non-naturally occurring amino acids include, for example, (D)-amino acids, norleucine, norvaline, p-fluorophenylalanine, ethionine and the like, which are known to a person skilled in the art. Amino acid analogs include modified forms of naturally and non-naturally occurring amino acids. Such modifications can include, for example, substitution or replacement of chemical groups and moieties on the amino acid or by derivatization of the amino acid Amino acid mimetics include, for example, organic structures which exhibit functionally similar properties such as charge and charge spacing characteristic of the reference amino acid. For example, an organic structure which mimics arginine (Arg or R) would have a positive charge moiety located in similar molecular space and having the same degree of mobility as the e-amino group of the side chain of the naturally occurring Arg amino acid. Mimetics also include constrained structures so as to maintain optimal spacing and charge interactions of the amino acid or of the amino acid functional groups. Those skilled in the art know or can determine what structures constitute functionally equivalent amino acid analogs and amino acid mimetics.

[0197] As used herein, the term “antibody” encompasses not only intact polyclonal or monoclonal antibodies, but also fragments thereof (such as dAb, Fab, Fab′, F(ab′)2, Fv), single chain (ScFv), synthetic variants thereof, naturally occurring variants, fusion proteins comprising an antibody portion with an antigen-binding fragment of the required specificity, humanized antibodies, chimeric antibodies, and any other modified configuration of the immunoglobulin molecule that comprises an antigen-binding site or fragment (epitope recognition site) of the required specificity. Certain features and characteristics of antibodies (and antigen-binding fragments thereof) are described in greater detail herein.

[0198] An antibody or antigen-binding fragment can be of essentially any type. As is well known in the art, an antibody is an immunoglobulin molecule capable of specific binding to a target through at least one epitope recognition site, located in the variable region of the immunoglobulin molecule.

[0199] The term “antigen-binding fragment” as used herein refers to a polypeptide fragment that contains at least one CDR of an immunoglobulin heavy and/or light chain that binds to the antigen of interest. In this regard, an antigen-binding fragment of the herein described antibodies may comprise 1, 2, 3, 4, 5, or all 6 CDRs of a V_{H} and V_{L} region from antibodies that bind to a target molecule.

[0200] The term “antigen” refers to a molecule or a portion of a molecule capable of being bound by a selective binding agent, such as an antibody, and additionally capable of being used in an animal to produce antibodies capable of binding to an epitope of that antigen. An antigen may have one or more epitopes. As used herein, the term “antigen” includes substances that are capable, under appropriate conditions, of inducing an immune response to the substance and of reacting with the products of the immune response. More broadly, the term “antigen” includes any substance to which an antibody binds, or for which antibodies are desired, regardless of whether the substance is immunogenic. For such antigens, antibodies can be identified by recombinant methods, independently of any immune response.

[0201] An “epitope” includes that portion of an antigen or other macromolecule capable of forming a binding interaction that interacts with the variable region binding pocket of an antibody, or antigen-binding fragment thereof. Such binding interaction can be manifested as an intermolecular contact with one or more amino acid residues of a CDR. Antigen binding can involve a CDR3 or a CDR3 pair. An epitope can be a linear peptide sequence (i.e., “continuous”) or can be composed of noncontiguous amino acid sequences (i.e., “conformational” or “discontinuous”). An antibody, or antigen-binding fragment thereof, can recognize one or more amino acid sequences; therefore an epitope can define more than one distinct amino acid sequence. Epitopes can be determined, for example, by peptide mapping and sequence analysis techniques well known to one of skill in the art. In particular embodiments, an epitope comprises, consists, or consists essentially of about, at least about, or no more than about 3, 4, 5, 6, 7, 8, 9, 10, 11, 12, 13, 14, 15, 16, 17, 18, 19, or 20 contiguous amino acids (i.e., a linear epitope) or non-contiguous amino acids (i.e., conformational epitope) of a reference sequence or target molecule described herein.

[0202] A “paratope”, also called an antigen-binding site, refers to the part of an immunoglobulin that recognizes and binds to an antigen or antigens. In some instances, a paratope is a small region (e.g., of about 5 to 10 amino acids) within the fragment antigen-binding (Fab) region of an immunoglobulin, and includes a set of six complementarity-determining regions (CDR loops).

[0203] The binding properties of antibodies and antigen-binding fragments thereof can be quantified using methods well known in the art (see Davies et al., Annual Rev. Biochem. 59:439-473, 1990). In some embodiments, an antibody or antigen-binding fragment thereof specifically binds to a target molecule, for example, a cell surface receptor, a cancer or immunomodulatory antigen, or an epitope or complex thereof, with an equilibrium dissociation constant that is about or ranges from about ≤10⁻⁷ M to about 10⁻⁸ M. In some embodiments, the equilibrium dissociation constant is about or ranges from about ≤10⁻⁹ M to about ≤10⁻¹⁰ M. In certain embodiments, an antibody or antigen-binding fragment thereof has an affinity (Kd or EC₅₀) for a target molecule (to which it specifically binds) of about, at least about, or less than about, 0.01, 0.05, 0.1, 0.2, 0.3, 0.4, 0.5, 0.6, 0.7, 0.8, 0.9, 1, 2, 3, 4, 5, 6, 7, 8, 9, 10, 11, 12, 13, 14, 15, 16, 17, 18, 19, 20, 21, 22, 23, 24, 25, 26, 27, 28, 29, 30, 40, or 50 nM.

[0204] A molecule such as a polypeptide or antibody is said to exhibit “specific binding” or “preferential binding” if it reacts or associates more frequently, more rapidly, with greater duration and/or with greater affinity with a particular cell(s), substance(s), or particular epitope(s) than it does with alternative cells or substances, or epitopes. An antibody “specifically binds” or “preferentially binds” to a target molecule or epitope if it binds with greater affinity, avidity, more readily, and/or with greater duration than it binds to other substances or epitopes, for example, by a statistically significant amount. Typically one member of the pair of molecules that exhibit specific binding has an area on its surface, or a cavity, which specifically binds to and is therefore complementary to a particular spatial and/or polar organization of the other member of the pair of molecules. Thus, the members of the pair have the property of binding specifically to each other. For instance, an antibody that specifically or preferentially binds to a specific epitope is an antibody that binds that specific epitope with greater affinity, avidity, more readily, and/or with greater duration than it binds to other epitopes. It is also understood by reading this definition that, for example, an antibody (or moiety or epitope) that specifically or preferentially binds to a first target may or may not specifically or preferentially bind to a second target. The term is also applicable where, for example, an antibody is specific for a particular epitope which is carried by a number of antigens, in which case the specific binding member carrying the antigen-binding fragment or domain will be able to bind to the various antigens carrying the epitope; for example, it may be cross reactive to a number of different forms of a target antigen from multiple species that share a common epitope

[0205] Immunological binding generally refers to the non-covalent interactions of the type which occur between an immunoglobulin molecule and an antigen for which the immunoglobulin is specific, for example by way of illustration and not limitation, as a result of electrostatic, ionic, hydrophilic and/or hydrophobic attractions or repulsion, steric forces, hydrogen bonding, van der Waals forces, and other interactions. The strength, or affinity of immunological binding interactions can be expressed in terms of the dissociation constant (Kd) of the interaction, wherein a smaller Kd represents a greater affinity Immunological binding properties of selected polypeptides can be quantified using methods well known in the art. One such method entails measuring the rates of antigen-binding site/antigen complex formation and dissociation, wherein those rates depend on the concentrations of the complex partners, the affinity of the interaction, and on geometric parameters that equally influence the rate in both directions. Thus, both the “on rate constant” (Kon) and the “off rate constant” (Koff) can be determined by calculation of the concentrations and the actual rates of association and dissociation. The ratio of Koff/Kon enables cancellation of all parameters not related to affinity, and is thus equal to the dissociation constant Kd. As used herein, the term “affinity” includes the equilibrium constant for the reversible binding of two agents and is expressed as Kd or EC₅₀. Affinity of a binding protein to a ligand such as affinity of an antibody for an epitope can be, for example, from about 100 nanomolar (nM) to about 0.1 nM, from about 100 nM to about 1 picomolar (pM), or from about 100 nM to about 1 femtomolar (fM). As used herein, the term “avidity” refers to the resistance of a complex of two or more agents to dissociation after dilution. In some embodiments, affinity is expressed in the terms of the half maximal effective concentration (EC₅₀), which refers to the concentration of an agent, such as an antibody, as disclosed herein, which induces a response halfway between the baseline and maximum after a specified exposure time. The EC₅₀ is commonly used as a measure of an antibody's potency.

[0206] Antibodies may be prepared by any of a variety of techniques known to those of ordinary skill in the art. See, e.g., Harlow and Lane, Antibodies: A Laboratory Manual, Cold Spring Harbor Laboratory, 1988. Monoclonal antibodies specific for a polypeptide of interest may be prepared, for example, using the technique of Kohler and Milstein, Eur. J. Immunol. 6:511-519, 1976, and improvements thereto. Also included are methods that utilize transgenic animals such as mice to express human antibodies. See, e.g., Neuberger et al., Nature Biotechnology 14:826, 1996; Lonberg et al., Handbook of Experimental Pharmacology 113:49-101, 1994; and Lonberg et al., Internal Review of Immunology 13:65-93, 1995. Particular examples include the VELOCIMMUNE® platform by REGENEREX® (see, e.g., U.S. Pat. No. 6,596,541).

[0207] Antibodies can also be generated or identified by the use of phage display or yeast display libraries (see, e.g., U.S. Pat. No. 7,244,592; Chao et al., Nature Protocols. 1:755-768, 2006). Non-limiting examples of available libraries include cloned or synthetic libraries, such as the Human Combinatorial Antibody Library (HuCAL), in which the structural diversity of the human antibody repertoire is represented by seven heavy chain and seven light chain variable region genes. The combination of these genes gives rise to 49 frameworks in the master library. By superimposing highly variable genetic cassettes (CDRs=complementarity determining regions) on these frameworks, the vast human antibody repertoire can be reproduced. Also included are human libraries designed with human-donor-sourced fragments encoding a light-chain variable region, a heavy-chain CDR-3, synthetic DNA encoding diversity in heavy-chain CDR-1, and synthetic DNA encoding diversity in heavy-chain CDR-2. Other libraries suitable for use will be apparent to persons skilled in the art.

[0208] In certain embodiments, antibodies and antigen-binding fragments thereof as described herein include a heavy chain and a light chain CDR set, respectively interposed between a heavy chain and a light chain framework region (FR) set which provide support to the CDRs and define the spatial relationship of the CDRs relative to each other. As used herein, the term “CDR set” refers to the three hypervariable regions of a heavy or light chain V region. Proceeding from the N-terminus of a heavy or light chain, these regions are denoted as “CDR1,” “CDR2,” and “CDR3” respectively. An antigen-binding site, therefore, includes six CDRs, comprising the CDR set from each of a heavy and a light chain V region. A polypeptide comprising a single CDR, (e.g., a CDR1, CDR2 or CDR3) is referred to herein as a “molecular recognition unit.” Crystallographic analysis of a number of antigen-antibody complexes has demonstrated that the amino acid residues of CDRs form extensive contact with bound antigen, wherein the most extensive antigen contact is with the heavy chain CDR3. Thus, the molecular recognition units are primarily responsible for the specificity of an antigen-binding site.

[0209] As used herein, the term “FR set” refers to the four flanking amino acid sequences which frame the CDRs of a CDR set of a heavy or light chain V region. Some FR residues may contact bound antigen; however, FRs are primarily responsible for folding the V region into the antigen-binding site, particularly the FR residues directly adjacent to the CDRs. Within FRs, certain amino residues and certain structural features are very highly conserved. In this regard, all V region sequences contain an internal disulfide loop of around 90 amino acid residues. When the V regions fold into a binding-site, the CDRs are displayed as projecting loop motifs which form an antigen-binding surface. It is generally recognized that there are conserved structural regions of FRs which influence the folded shape of the CDR loops into certain “canonical” structures—regardless of the precise CDR amino acid sequence. Further, certain FR residues are known to participate in non-covalent interdomain contacts which stabilize the interaction of the antibody heavy and light chains.

[0210] The structures and locations of immunoglobulin variable domains may be determined by reference to Kabat, E. A. et al., Sequences of Proteins of Immunological Interest. 4th Edition. US Department of Health and Human Services. 1987, and updates thereof.

[0211] Also include are “monoclonal” antibodies, which refer to a homogeneous antibody population wherein the monoclonal antibody is comprised of amino acids (naturally occurring and non-naturally occurring) that are involved in the selective binding of an epitope. Monoclonal antibodies are highly specific, being directed against a single epitope. The term “monoclonal antibody” encompasses not only intact monoclonal antibodies and full-length monoclonal antibodies, but also fragments thereof (such as Fab, Fab′, F(ab′)2, Fv), single chain (ScFv), variants thereof, fusion proteins comprising an antigen-binding portion, humanized monoclonal antibodies, chimeric monoclonal antibodies, and any other modified configuration of the immunoglobulin molecule that comprises an antigen-binding fragment (epitope recognition site) of the required specificity and the ability to bind to an epitope. It is not intended to be limited as regards the source of the antibody or the manner in which it is made (e.g., by hybridoma, phage selection, recombinant expression, transgenic animals) The term includes whole immunoglobulins as well as the fragments etc. described above under the definition of “antibody.”

[0212] The proteolytic enzyme papain preferentially cleaves IgG molecules to yield several fragments, two of which (the F(ab) fragments) each comprise a covalent heterodimer that includes an intact antigen-binding site. The enzyme pepsin is able to cleave IgG molecules to provide several fragments, including the F(ab′)2 fragment which comprises both antigen-binding sites. An Fv fragment for use according to certain embodiments can be produced by preferential proteolytic cleavage of an IgM, and on rare occasions of an IgG or IgA immunoglobulin molecule. Fv fragments are, however, more commonly derived using recombinant techniques known in the art. The Fv fragment includes a non-covalent V_{H}::V_{L} heterodimer including an antigen-binding site which retains much of the antigen recognition and binding capabilities of the native antibody molecule. See Inbar et al., PNAS USA. 69:2659-2662, 1972; Hochman et al., Biochem. 15:2706-2710, 1976; and Ehrlich et al., Biochem. 19:4091-4096, 1980.

[0213] In certain embodiments, single chain Fv (scFV) antibodies are contemplated. For example, Kappa bodies (Ill et al., Prot. Eng. 10:949-57, 1997); minibodies (Martin et al., EMBO J 13:5305-9, 1994); diabodies (Holliger et al., PNAS 90: 6444-8, 1993); or Janusins (Traunecker et al., EMBO J 10: 3655-59, 1991; and Traunecker et al., Int. J. Cancer Suppl. 7:51-52, 1992), may be prepared using standard molecular biology techniques following the teachings of the present application with regard to selecting antibodies having the desired specificity.

[0214] A single chain Fv (scFv) polypeptide is a covalently linked V_{H}::V_{L} heterodimer which is expressed from a gene fusion including V_{H}- and V_{L}-encoding genes linked by a peptide-encoding linker. Huston et al. (PNAS USA. 85(16):5879-5883, 1988). A number of methods have been described to discern chemical structures for converting the naturally aggregated—but chemically separated—light and heavy polypeptide chains from an antibody V region into an scFv molecule which will fold into a three dimensional structure substantially similar to the structure of an antigen-binding site. See, e.g., U.S. Pat. Nos. 5,091,513 and 5,132,405, to Huston et al.; and U.S. Pat. No. 4,946,778, to Ladner et al.

[0215] Certain embodiments include “probodies”, or antibodies where the binding site(s) are masked or otherwise inert until activated by proteolytic cleavage in target or disease tissue. Certain of these and related embodiments comprise one or more masking moieties that sterically hinder the antigen-binding site(s) of the antibody, and which are fused to the antibody via one or more proteolytically-cleavable linkers (see, for example, Polu and Lowman, Expert Opin. Biol. Ther. 14:1049-1053, 2014).

[0216] In certain embodiments, an antibody as described herein is in the form of a diabody. Diabodies are multimers of polypeptides, each polypeptide comprising a first domain comprising a binding region of an immunoglobulin light chain and a second domain comprising a binding region of an immunoglobulin heavy chain, the two domains being linked (e.g., by a peptide linker) but unable to associate with each other to form an antigen-binding site: antigen-binding sites are formed by the association of the first domain of one polypeptide within the multimer with the second domain of another polypeptide within the multimer (WO94/13804).

[0217] A dAb fragment of an antibody consists of a V_{H} domain (Ward, E. S. et al., Nature 341, 544-546 (1989)).

[0218] Where bispecific or multi-specific antibodies are to be used, these may be conventional bispecific antibodies, which can be manufactured in a variety of ways (Holliger and Winter, Current Opinion Biotechnol. 4:446-449, 1993), e.g., prepared chemically or from hybrid hybridomas, or may be any of the bispecific antibody fragments mentioned above. Diabodies and scFv can be constructed without an Fc region, using only variable domains, potentially reducing the effects of anti-idiotypic reaction. Bispecific whole antibodies may be made by knobs-into-holes engineering (J. B. B. Ridgeway et al., Protein Eng., 9, 616-621, 1996).

[0219] Bispecific diabodies, as opposed to bispecific whole antibodies, may also be particularly useful because they can be readily constructed and expressed in E. coli. Diabodies (and many other polypeptides such as antibody fragments) of appropriate binding specificities can be readily selected using phage display (WO94/13804) from libraries. If one arm of the diabody is to be kept constant, for instance, with a specificity directed against antigen X, then a library can be made where the other arm is varied and an antibody of appropriate specificity selected.

[0220] In certain embodiments, the antibodies described herein may be provided in the form of a UniBody®. A UniBody® is an IgG4 antibody with the hinge region removed (see GenMab Utrecht, The Netherlands; see also, e.g., US20090226421). This proprietary antibody technology creates a stable, smaller antibody format with an anticipated longer therapeutic window than current small antibody formats. IgG4 antibodies are considered inert and thus do not interact with the immune system. Fully human IgG4 antibodies may be modified by eliminating the hinge region of the antibody to obtain half-molecule fragments having distinct stability properties relative to the corresponding intact IgG4 (GenMab, Utrecht). Halving the IgG4 molecule leaves only one area on the UniBody® that can bind to cognate antigens (e.g., disease targets) and the UniBody® therefore binds univalently to only one site on target cells. For certain cancer cell surface antigens, this univalent binding may not stimulate the cancer cells to grow as may be seen using bivalent antibodies having the same antigen specificity, and hence UniBody® technology may afford treatment options for some types of cancer that may be refractory to treatment with conventional antibodies. The small size of the UniBody® can be a great benefit when treating some forms of cancer, allowing for better distribution of the molecule over larger solid tumors and potentially increasing efficacy.

[0221] In certain embodiments, the antibodies of the present disclosure may take the form of a Nanobody®. Nanobodies® are encoded by single genes and are efficiently produced in almost all prokaryotic and eukaryotic hosts e.g. E. coli (see e.g. U.S. Pat. No. 6,765,087), molds (for example Aspergillus or Trichoderma) and yeast (for example Saccharomyces, Kluyvermyces, Hansenula or Pichia (see e.g. U.S. Pat. No. 6,838,254). The production process is scalable and multi-kilogram quantities of Nanobodies® have been produced. Nanobodies may be formulated as a ready-to-use solution having a long shelf life. The Nanoclone® method (see, e.g., WO 06/079372) is a proprietary method for generating Nanobodies against a desired target, based on automated high-throughput selection of B-cells.

[0222] In certain embodiments, the antibodies or antigen-binding fragments thereof are humanized. These embodiments refer to a chimeric molecule, generally prepared using recombinant techniques, having an antigen-binding site derived from an immunoglobulin from a non-human species and the remaining immunoglobulin structure of the molecule based upon the structure and/or sequence of a human immunoglobulin. The antigen-binding site may comprise either complete variable domains fused onto constant domains or only the CDRs grafted onto appropriate framework regions in the variable domains. Epitope binding sites may be wild type or modified by one or more amino acid substitutions. This eliminates the constant region as an immunogen in human individuals, but the possibility of an immune response to the foreign variable region remains (LoBuglio et al., PNAS USA 86:4220-4224, 1989; Queen et al., PNAS USA. 86:10029-10033, 1988; Riechmann et al., Nature. 332:323-327, 1988). Illustrative methods for humanization of antibodies include the methods described in U.S. Pat. No. 7,462,697.

[0223] Another approach focuses not only on providing human-derived constant regions, but modifying the variable regions as well so as to reshape them as closely as possible to human form. It is known that the variable regions of both heavy and light chains contain three complementarity-determining regions (CDRs) which vary in response to the epitopes in question and determine binding capability, flanked by four framework regions (FRs) which are relatively conserved in a given species and which putatively provide a scaffolding for the CDRs. When nonhuman antibodies are prepared with respect to a particular epitope, the variable regions can be “reshaped” or “humanized” by grafting CDRs derived from nonhuman antibody on the FRs present in the human antibody to be modified. Application of this approach to various antibodies has been reported by Sato et al., Cancer Res. 53:851-856, 1993; Riechmann et al., Nature 332:323-327, 1988; Verhoeyen et al., Science 239:1534-1536, 1988; Kettleborough et al., Protein Engineering. 4:773-3783, 1991; Maeda et al., Human Antibodies Hybridoma 2:124-134, 1991; Gorman et al., PNAS USA. 88:4181-4185, 1991; Tempest et al., Bio/Technology 9:266-271, 1991; Co et al., PNAS USA. 88:2869-2873, 1991; Carter et al., PNAS USA. 89:4285-4289, 1992; and Co et al., J Immunol. 148:1149-1154, 1992. In some embodiments, humanized antibodies preserve all CDR sequences (for example, a humanized mouse antibody which contains all six CDRs from the mouse antibodies). In other embodiments, humanized antibodies have one or more CDRs (one, two, three, four, five, six) which are altered with respect to the original antibody, which are also termed one or more CDRs “derived from” one or more CDRs from the original antibody.

[0224] In certain embodiments, the antibodies are “chimeric” antibodies. In this regard, a chimeric antibody is comprised of an antigen-binding fragment of an antibody operably linked or otherwise fused to a heterologous Fc portion of a different antibody. In certain embodiments, the Fc domain or heterologous Fc domain is of human origin. In certain embodiments, the Fc domain or heterologous Fc domain is of mouse origin. In other embodiments, the heterologous Fc domain may be from a different Ig class from the parent antibody, including IgA (including subclasses IgA1 and IgA2), IgD, IgE, IgG (including subclasses IgG1, IgG2, IgG3, and IgG4), and IgM. In further embodiments, the heterologous Fc domain may be comprised of CH2 and CH3 domains from one or more of the different Ig classes. As noted above with regard to humanized antibodies, the antigen-binding fragment of a chimeric antibody may comprise only one or more of the CDRs of the antibodies described herein (e.g., 1, 2, 3, 4, 5, or 6 CDRs of the antibodies described herein), or may comprise an entire variable domain (V_{L}, V_{H} or both).

[0225] As used herein, a subject “at risk” of developing a disease, or adverse reaction may or may not have detectable disease, or symptoms of disease, and may or may not have displayed detectable disease or symptoms of disease prior to the treatment methods described herein. “At risk” denotes that a subject has one or more risk factors, which are measurable parameters that correlate with development of a disease, as described herein and known in the art. A subject having one or more of these risk factors has a higher probability of developing disease, or an adverse reaction than a subject without one or more of these risk factor(s).

[0226] “Biocompatible” refers to materials or compounds which are generally not injurious to biological functions of a cell or subject and which will not result in any degree of unacceptable toxicity, including allergenic and disease states.

[0227] The term “binding” refers to a direct association between two molecules, due to, for example, covalent, electrostatic, hydrophobic, and ionic and/or hydrogen-bond interactions, including interactions such as salt bridges and water bridges.

[0228] By “coding sequence” is meant any nucleic acid sequence that contributes to the code for the polypeptide product of a gene. By contrast, the term “non-coding sequence” refers to any nucleic acid sequence that does not directly contribute to the code for the polypeptide product of a gene.

[0229] Throughout this disclosure, unless the context requires otherwise, the words “comprise,” “comprises,” and “comprising” will be understood to imply the inclusion of a stated step or element or group of steps or elements but not the exclusion of any other step or element or group of steps or elements.

[0230] By “consisting of” is meant including, and limited to, whatever follows the phrase “consisting of.” Thus, the phrase “consisting of” indicates that the listed elements are required or mandatory, and that no other elements may be present. By “consisting essentially of” is meant including any elements listed after the phrase, and limited to other elements that do not interfere with or contribute to the activity or action specified in the disclosure for the listed elements. Thus, the phrase “consisting essentially of” indicates that the listed elements are required or mandatory, but that other elements are optional and may or may not be present depending upon whether or not they materially affect the activity or action of the listed elements.

[0231] The term “endotoxin free” or “substantially endotoxin free” relates generally to compositions, solvents, and/or vessels that contain at most trace amounts (e.g., amounts having no clinically adverse physiological effects to a subject) of endotoxin, and preferably undetectable amounts of endotoxin. Endotoxins are toxins associated with certain micro-organisms, such as bacteria, typically gram-negative bacteria, although endotoxins may be found in gram-positive bacteria, such as Listeria monocytogenes. The most prevalent endotoxins are lipopolysaccharides (LPS) or lipo-oligo-saccharides (LOS) found in the outer membrane of various Gram-negative bacteria, and which represent a central pathogenic feature in the ability of these bacteria to cause disease. Small amounts of endotoxin in humans may produce fever, a lowering of the blood pressure, and activation of inflammation and coagulation, among other adverse physiological effects.

[0232] Therefore, in pharmaceutical production, it is often desirable to remove most or all traces of endotoxin from drug products and/or drug containers, because even small amounts may cause adverse effects in humans. A depyrogenation oven may be used for this purpose, as temperatures in excess of 300° C. are typically required to break down most endotoxins. For instance, based on primary packaging material such as syringes or vials, the combination of a glass temperature of 250° C. and a holding time of 30 minutes is often sufficient to achieve a 3 log reduction in endotoxin levels. Other methods of removing endotoxins are contemplated, including, for example, chromatography and filtration methods, as described herein and known in the art.

[0233] Endotoxins can be detected using routine techniques known in the art. For example, the Limulus Amoebocyte Lysate assay, which utilizes blood from the horseshoe crab, is a very sensitive assay for detecting presence of endotoxin. In this test, very low levels of LPS can cause detectable coagulation of the limulus lysate due a powerful enzymatic cascade that amplifies this reaction. Endotoxins can also be quantitated by enzyme-linked immunosorbent assay (ELISA). To be substantially endotoxin free, endotoxin levels may be less than about 0.001, 0.005, 0.01, 0.02, 0.03, 0.04, 0.05, 0.06, 0.08, 0.09, 0.1, 0.5, 1.0, 1.5, 2, 2.5, 3, 4, 5, 6, 7, 8, 9, or 10 EU/mg of active compound. Typically, 1 ng lipopolysaccharide (LPS) corresponds to about 1-10 EU.

[0234] The term “half maximal effective concentration” or “EC₅₀” refers to the concentration of an agent (e.g., antibody) as described herein at which it induces a response halfway between the baseline and maximum after some specified exposure time; the EC₅₀ of a graded dose response curve therefore represents the concentration of a compound at which 50% of its maximal effect is observed. EC₅₀ also represents the plasma concentration required for obtaining 50% of a maximum effect in vivo. Similarly, the “EC₉₀” refers to the concentration of an agent or composition at which 90% of its maximal effect is observed. The “EC₉₀” can be calculated from the “EC50” and the Hill slope, or it can be determined from the data directly, using routine knowledge in the art. In some embodiments, the EC₅₀ of an agent (e.g., antibody) is less than about 0.01, 0.05, 0.1, 0.2, 0.3, 0.4, 0.5, 0.6, 0.7, 0.8, 0.9, 1, 2, 3, 4, 5, 6, 7, 8, 9, 10, 11, 12, 13, 14, 15, 16, 17, 18, 19, 20, 25, 30, 40, 50, 60, 70, 80, 90, 100, 200 or 500 nM. In some embodiments, an agent will have an EC₅₀ value of about 1 nM or less.

[0235] “Immune response” means any immunological response originating from immune system, including responses from the cellular and humeral, innate and adaptive immune systems. Exemplary cellular immune cells include for example, lymphocytes, macrophages, T cells, B cells, NK cells, neutrophils, eosinophils, dendritic cells, mast cells, monocytes, and all subsets thereof. Cellular responses include for example, effector function, cytokine release, phagocytosis, efferocytosis, translocation, trafficking, proliferation, differentiation, activation, repression, cell-cell interactions, apoptosis, etc. Humeral responses include for example IgG, IgM, IgA, IgE, responses and their corresponding effector functions.

[0236] The “half-life” of an agent such as an antibody can refer to the time it takes for the agent to lose half of its pharmacologic, physiologic, or other activity, relative to such activity at the time of administration into the serum or tissue of an organism, or relative to any other defined time-point. “Half-life” can also refer to the time it takes for the amount or concentration of an agent to be reduced by half of a starting amount administered into the serum or tissue of an organism, relative to such amount or concentration at the time of administration into the serum or tissue of an organism, or relative to any other defined time-point. The half-life can be measured in serum and/or any one or more selected tissues.

[0237] The terms “modulating” and “altering” include “increasing,” “enhancing” or “stimulating,” as well as “decreasing” or “reducing,” typically in a statistically significant or a physiologically significant amount or degree relative to a control. An “increased,” “stimulated” or “enhanced” amount is typically a “statistically significant” amount, and may include an increase that is 1.1, 1.2, 1.5, 2, 3, 4, 5, 6, 7, 8, 9, 10, 15, 20, 30, 40, 50, 60, 70, 80, 90, 100 or more times (e.g., 500, 1000 times) (including all integers and ranges in between e.g., 1.5, 1.6, 1.7. 1.8, etc.) the amount produced by no composition (e.g., the absence of agent) or a control composition. A “decreased” or “reduced” amount is typically a “statistically significant” amount, and may include a 1%, 2%, 3%, 4%, 5%, 6%, 7%, 8%, 9%, 10%, 11%, 12%, 13%, 14%, 15%, 16%, 17%, 18%, 19%, 20%, 25%, 30%, 35%, 40%, 45%, 50%, 55%, 60%, 65%, 70%, 75%, 80%, 85%, 90%, 95%, or 100% decrease (including all integers and ranges in between) in the amount produced by no composition (e.g., the absence of an agent) or a control composition. Examples of comparisons and “statistically significant” amounts are described herein.

[0238] The terms “polypeptide,” “protein” and “peptide” are used interchangeably and mean a polymer of amino acids not limited to any particular length. The term “enzyme” includes polypeptide or protein catalysts. The terms include modifications such as myristoylation, sulfation, glycosylation, phosphorylation and addition or deletion of signal sequences. The terms “polypeptide” or “protein” means one or more chains of amino acids, wherein each chain comprises amino acids covalently linked by peptide bonds, and wherein said polypeptide or protein can comprise a plurality of chains non-covalently and/or covalently linked together by peptide bonds, having the sequence of native proteins, that is, proteins produced by naturally-occurring and specifically non-recombinant cells, or genetically-engineered or recombinant cells, and comprise molecules having the amino acid sequence of the native protein, or molecules having deletions from, additions to, and/or substitutions of one or more amino acids of the native sequence. In certain embodiments, the polypeptide is a “recombinant” polypeptide, produced by recombinant cell that comprises one or more recombinant DNA molecules, which are typically made of heterologous polynucleotide sequences or combinations of polynucleotide sequences that would not otherwise be found in the cell.

[0239] The term “polynucleotide” and “nucleic acid” includes mRNA, RNA, cRNA, cDNA, and DNA. The term typically refers to polymeric form of nucleotides of at least 10 bases in length, either ribonucleotides or deoxynucleotides or a modified form of either type of nucleotide. The term includes single and double stranded forms of DNA. The terms “isolated DNA” and “isolated polynucleotide” and “isolated nucleic acid” refer to a molecule that has been isolated free of total genomic DNA of a particular species. Therefore, an isolated DNA segment encoding a polypeptide refers to a DNA segment that contains one or more coding sequences yet is substantially isolated away from, or purified free from, total genomic DNA of the species from which the DNA segment is obtained. Also included are non-coding polynucleotides (e.g., primers, probes, oligonucleotides), which do not encode a polypeptide. Also included are recombinant vectors, including, for example, expression vectors, viral vectors, plasmids, cosmids, phagemids, phage, viruses, and the like.

[0240] Additional coding or non-coding sequences may, but need not, be present within a polynucleotide described herein, and a polynucleotide may, but need not, be linked to other molecules and/or support materials. Hence, a polynucleotide or expressible polynucleotides, regardless of the length of the coding sequence itself, may be combined with other sequences, for example, expression control sequences.

[0241] The term “isolated” polypeptide or protein referred to herein means that a subject protein (1) is free of at least some other proteins with which it would typically be found in nature, (2) is essentially free of other proteins from the same source, e.g., from the same species, (3) is expressed by a cell from a different species, (4) has been separated from at least about 50 percent of polynucleotides, lipids, carbohydrates, or other materials with which it is associated in nature, (5) is not associated (by covalent or non-covalent interaction) with portions of a protein with which the “isolated protein” is associated in nature, (6) is operably associated (by covalent or non-covalent interaction) with a polypeptide with which it is not associated in nature, or (7) does not occur in nature. Such an isolated protein can be encoded by genomic DNA, cDNA, mRNA or other RNA, of may be of synthetic origin, or any combination thereof. In certain embodiments, the isolated protein is substantially free from proteins or polypeptides or other contaminants that are found in its natural environment that would interfere with its use (therapeutic, diagnostic, prophylactic, research or otherwise).

[0242] In certain embodiments, the “purity” of any given agent (e.g., antibody) in a composition may be defined. For instance, certain compositions may comprise an agent that is at least 80%, 85%, 90%, 91%, 92%, 93%, 94%, 95%, 96%, 97%, 98%, 99%, or 100% pure on a protein basis or a weight-weight basis, including all decimals and ranges in between, as measured, for example and by no means limiting, by high performance liquid chromatography (HPLC), a well-known form of column chromatography used frequently in biochemistry and analytical chemistry to separate, identify, and quantify compounds.

[0243] The term “reference sequence” refers generally to a nucleic acid coding sequence, or amino acid sequence, to which another sequence is being compared. All polypeptide and polynucleotide sequences described herein are included as references sequences, including those described by name and those described in the Tables and the Sequence Listing.

[0244] Certain embodiments include biologically active “variants” and “fragments” of the proteins/polypeptides described herein, and the polynucleotides that encode the same. “Variants” contain one or more substitutions, additions, deletions, and/or insertions relative to a reference polypeptide or polynucleotide (see, e.g., the Tables and the Sequence Listing). A variant polypeptide or polynucleotide comprises an amino acid or nucleotide sequence with at least about 50%, 55%, 60%, 65%, 70%, 75%, 80%, 85%, 90%, 91%, 92%, 93%, 94%, 95%, 96%, 97%, 98%, 99% or more sequence identity or similarity or homology to a reference sequence, as described herein, and substantially retains the activity of that reference sequence. Also included are sequences that consist of or differ from a reference sequences by the addition, deletion, insertion, or substitution of 1, 2, 3, 4, 5, 6, 7, 8, 9, 10, 11, 12, 13, 14, 15, 16, 17, 18, 19, 20, 30, 40, 50, 60,70, 80, 90, 100, 110, 120, 130, 140, 150 or more amino acids or nucleotides and which substantially retain at least one activity of that reference sequence. In certain embodiments, the additions or deletions include C-terminal and/or N-terminal additions and/or deletions.

[0245] The terms “sequence identity” or, for example, comprising a “sequence 50% identical to,” as used herein, refer to the extent that sequences are identical on a nucleotide-by-nucleotide basis or an amino acid-by-amino acid basis over a window of comparison. Thus, a “percentage of sequence identity” may be calculated by comparing two optimally aligned sequences over the window of comparison, determining the number of positions at which the identical nucleic acid base (e.g., A, T, C, G, I) or the identical amino acid residue (e.g., Ala, Pro, Ser, Thr, Gly, Val, Leu, Ile, Phe, Tyr, Trp, Lys, Arg, His, Asp, Glu, Asn, Gln, Cys and Met) occurs in both sequences to yield the number of matched positions, dividing the number of matched positions by the total number of positions in the window of comparison (i.e., the window size), and multiplying the result by 100 to yield the percentage of sequence identity. Optimal alignment of sequences for aligning a comparison window may be conducted by computerized implementations of algorithms (GAP, BESTFIT, FASTA, and TFASTA in the Wisconsin Genetics Software Package Release 7.0, Genetics Computer Group, 575 Science Drive Madison, Wis., USA) or by inspection and the best alignment (i.e., resulting in the highest percentage homology over the comparison window) generated by any of the various methods selected. Reference also may be made to the BLAST family of programs as for example disclosed by Altschul et al., Nucl. Acids Res. 25:3389, 1997.

[0246] The term “solubility” refers to the property of an agent (e.g., antibody) provided herein to dissolve in a liquid solvent and form a homogeneous solution. Solubility is typically expressed as a concentration, either by mass of solute per unit volume of solvent (g of solute per kg of solvent, g per dL (100 mL), mg/ml, etc.), molarity, molality, mole fraction or other similar descriptions of concentration. The maximum equilibrium amount of solute that can dissolve per amount of solvent is the solubility of that solute in that solvent under the specified conditions, including temperature, pressure, pH, and the nature of the solvent. In certain embodiments, solubility is measured at physiological pH, or other pH, for example, at pH 5.0, pH 6.0, pH 7.0, pH 7.4, pH 7.6, pH 7.8, or pH 8.0 (e.g., about pH 5-8). In certain embodiments, solubility is measured in water or a physiological buffer such as PBS or NaCl (with or without NaPO₄). In specific embodiments, solubility is measured at relatively lower pH (e.g., pH 6.0) and relatively higher salt (e.g., 500 mM NaCl and 10 mM NaPO₄). In certain embodiments, solubility is measured in a biological fluid (solvent) such as blood or serum. In certain embodiments, the temperature can be about room temperature (e.g., about 20, 21, 22, 23, 24, 25° C.) or about body temperature (37° C.). In certain embodiments, an agent has a solubility of at least about 0.1, 0.2, 0.3, 0.4, 0.5, 0.6, 0.7, 0.8, 0.9, 1, 2, 3, 4, 5, 6, 7, 8, 9, 10, 11, 12, 13, 14, 15, 16, 17, 18, 19, 20, 25, 30, 40, 50, 60, 70, 80, 90 or 100 mg/ml at room temperature or at 37° C.

[0247] A “subject” or a “subject in need thereof” or a “patient” or a “patient in need thereof” includes a mammalian subject such as a human subject.

[0248] “Substantially” or “essentially” means nearly totally or completely, for instance, 95%, 96%, 97%, 98%, 99% or greater of some given quantity.

[0249] By “statistically significant,” it is meant that the result was unlikely to have occurred by chance. Statistical significance can be determined by any method known in the art. Commonly used measures of significance include the p-value, which is the frequency or probability with which the observed event would occur, if the null hypothesis were true. If the obtained p-value is smaller than the significance level, then the null hypothesis is rejected. In simple cases, the significance level is defined at a p-value of 0.05 or less.

[0250] “Therapeutic response” refers to improvement of symptoms (whether or not sustained) based on administration of one or more therapeutic agents.

[0251] As used herein, the terms “therapeutically effective amount”, “therapeutic dose,” “prophylactically effective amount,” or “diagnostically effective amount” is the amount of an agent (e.g., antibody) needed to elicit the desired biological response following administration.

[0252] As used herein, “treatment” of a subject (e.g., a mammal, such as a human) or a cell is any type of intervention used in an attempt to alter the natural course of the individual or cell. Treatment includes, but is not limited to, administration of a pharmaceutical composition, and may be performed either prophylactically or subsequent to the initiation of a pathologic event or contact with an etiologic agent. Also included are “prophylactic” treatments, which can be directed to reducing the rate of progression of the disease or condition being treated, delaying the onset of that disease or condition, or reducing the severity of its onset. “Treatment” or “prophylaxis” does not necessarily indicate complete eradication, cure, or prevention of the disease or condition, or associated symptoms thereof.

[0253] The term “wild-type” refers to a gene or gene product (e.g., a polypeptide) that is most frequently observed in a population and is thus arbitrarily designed the “normal” or “wild-type” form of the gene.

[0254] Each embodiment in this specification is to be applied to every other embodiment unless expressly stated otherwise.

[0255] Antibodies and Antigen-Binding Fragments Thereof

[0256] Certain embodiments include an isolated antibody, or antigen-binding fragment thereof, which specifically binds to a human fibroblast activation protein-α (FAPα or FAP). Certain antibodies, or antigen-binding fragments thereof, are “dual action” antibodies, which have dual binding specificity for human FAP and a human B7H3 protein at the same or substantially the same “paratope”, as described herein. For example, in some instances, a single fragment antigen binding (Fab) region is capable of binding to either human FAP or human B7H3 (see FIG. 1), but typically not both simultaneously. In some instances, two separate but linked Fab regions, for example, as part of a whole antibody, are capable of simultaneously binding to human FAP and human B7H3 (see FIG. 2). In some instances, a dual-action” antibody, or antigen-binding fragment thereof, specifically binds to human FAP and human B7H3 at the same or substantially the same paratope with comparable binding affinities, for example, wherein the binding affinities for FAP and B7H3 are about, within about, or less than about 1.5, 2, 3, 4, 5, 6, 7, 8, 9, 10, 15, 20, 25, 30, 40, or 50-fold relative to each other.

[0257] In certain embodiments, an antibody, or antigen-binding fragment thereof, is characterized by or comprises a heavy chain variable (V_{H}) region that comprises complementary determining region V_{H}CDR1, V_{H}CDR2, and V_{H}CDR3 regions, and a light chain variable region (V_{L}) region that comprises complementary determining V_{L}CDR1, V_{L}CDR2, and V_{L}CDR3 regions. The sequences of exemplary V_{H}CDR1, V_{H}CDR2, V_{H}CDR3, V_{L}CDR1, V_{L}CDR2, and V_{L}CDR3 regions are provided in Table A1 below.

TABLE A1
CDR Sequences

| | | |
|---|---|---|
| CDR | Sequence | SEQ ID NO: |

P14471450

| | | |
|---|---|---|
| HCDR1 | ENIIH | 1 |
| HCDR2 | WFHPGSGSIKYNEKFKD | 2 |
| HCDR3 | HGGTGRGAMDY | 3 |
| LCDR1 | RASKSVSTSAYSYMH | 4 |
| LCDR2 | LASNLES | 5 |
| LCDR3 | QHSRELPYT | 6 |

P14481450

| | | |
|---|---|---|
| HCDR1 | ENIIH | 7 |
| HCDR2 | WFHPGSGSIKYNEKFKD | 8 |
| HCDR3 | HGGTGRGAMDY | 9 |
| LCDR1 | RASKSVSTSAYSYMH | 10 |
| LCDR2 | LASNLES | 11 |
| LCDR3 | QHSRELPYT | 12 |

P14482156

| | | |
|---|---|---|
| HCDR1 | ENIIH | 13 |
| HCDR2 | WFHPGSGSIKYNEKFKD | 14 |
| HCDR3 | HGGTGRGAMDY | 15 |
| LCDR1 | RASKSVSTSAYSYMH | 16 |
| LCDR2 | LASNRES | 17 |
| LCDR3 | MQSRELPYT | 18 |

P14482157

| | | |
|---|---|---|
| HCDR1 | ENIIH | 19 |
| HCDR2 | WFHPGSGSIKYNEKFKD | 20 |
| HCDR3 | HGGTGRGAMDY | 21 |
| LCDR1 | RASQSISTSAYSYMH | 22 |
| LCDR2 | LASNLES | 23 |
| LCDR3 | QQSRELPYT | 24 |

P21531450

| | | |
|---|---|---|
| HCDR1 | ENIIH | 25 |
| HCDR2 | IIHPGSGSIKYSPSFQG | 26 |
| HCDR3 | HGGTGRGAMDY | 27 |
| LCDR1 | RASKSVSTSAYSYMH | 28 |
| LCDR2 | LASNLES | 29 |
| LCDR3 | QHSRELPYT | 30 |

P21532156

| | | |
|---|---|---|
| HCDR1 | ENIIH | 31 |
| HCDR2 | IIHPGSGSIKYSPSFQG | 32 |
| HCDR3 | HGGTGRGAMDY | 33 |
| LCDR1 | RASKSVSTSAYSYMH | 34 |
| LCDR2 | LASNRES | 35 |
| LCDR3 | MQSRELPYT | 36 |

P21532157

| | | |
|---|---|---|
| HCDR1 | ENIIH | 37 |
| HCDR2 | IIHPGSGSIKYSPSFQG | 38 |
| HCDR3 | HGGTGRGAMDY | 39 |
| LCDR1 | RASQSISTSAYSYMH | 40 |
| LCDR2 | LASNLES | 41 |
| LCDR3 | QQSRELPYT | 42 |

P21542158

| | | |
|---|---|---|
| HCDR1 | ENIIH | 43 |
| HCDR2 | WIHPGSGSIKYAQKLQG | 44 |
| HCDR3 | HGGTGRGAMDY | 45 |
| LCDR1 | RASQSVSTSAYSYMH | 46 |
| LCDR2 | LASNLES | 47 |
| LCDR3 | QQSRELPYT | 48 |

P21542159

| | | |
|---|---|---|
| HCDR1 | ENIIH | 49 |
| HCDR2 | WIHPGSGSIKYAQKLQG | 50 |
| HCDR3 | HGGTGRGAMDY | 51 |
| LCDR1 | RASQSVSTSAYSYMH | 52 |
| LCDR2 | LASNRET | 53 |
| LCDR3 | QQSRELPYT | 54 |

P21552157

| | | |
|---|---|---|
| HCDR1 | ENIIH | 55 |
| HCDR2 | AIHPGSGSIKYADSVKG | 56 |
| HCDR3 | HGGTGRGAMDY | 57 |
| LCDR1 | RASQSISTSAYSYMH | 58 |
| LCDR2 | LASNLES | 59 |
| LCDR3 | QQSRELPYT | 60 |

Clone Name

| | | |
|---|---|---|
| HCDR1 | ENIIH | 61 |
| HCDR2 | AIHPGSGSIKYADSVKG | 62 |
| HCDR3 | HGGTGRGAMDY | 63 |
| LCDR1 | RASQSVSTSAYSYMH | 64 |
| LCDR2 | LASNLES | 65 |
| LCDR3 | QQSRELPYT | 66 |

P21552161

| | | |
|---|---|---|
| HCDR1 | ENIIH | 67 |
| HCDR2 | AIHPGSGSIKYADSVKG | 68 |
| HCDR3 | HGGTGRGAMDY | 69 |
| LCDR1 | RASQSVSTSAYSYMH | 70 |
| LCDR2 | LASNRET | 71 |
| LCDR3 | QQSRELPYT | 72 |

P24492158

| | | |
|---|---|---|
| HCDR1 | ENIIH | 73 |
| HCDR2 | WIHPGSGSIKYAQKLQG | 74 |
| HCDR3 | HGGTGRGAMDY | 75 |
| LCDR1 | RASQSVSTSAYSYMH | 76 |
| LCDR2 | LASNLES | 77 |
| LCDR3 | QQSRELPYT | 78 |

P24492470

| | | |
|---|---|---|
| HCDR1 | ENIIH | 79 |
| HCDR2 | WIHPGSGSIKYAQKLQG | 80 |
| HCDR3 | HGGTGRGAMDY | 81 |
| LCDR1 | RASQSVSASAYSYMH | 82 |
| LCDR2 | LASNLES | 83 |
| LCDR3 | QQSRELPYT | 84 |

P24492471

| | | |
|---|---|---|
| HCDR1 | ENIIH | 85 |
| HCDR2 | WIHPGSGSIKYAQKLQG | 86 |
| HCDR3 | HGGTGRGAMDY | 87 |
| LCDR1 | RASQSVSTAAYSYMH | 88 |
| LCDR2 | LASNLES | 89 |
| LCDR3 | QQSRELPYT | 90 |

P24492472

| | | |
|---|---|---|
| HCDR1 | ENIIH | 91 |
| HCDR2 | WIHPGSGSIKYAQKLQG | 92 |
| HCDR3 | HGGTGRGAMDY | 93 |
| LCDR1 | RASQSVSTSAASYMH | 94 |
| LCDR2 | LASNLES | 95 |
| LCDR3 | QQSRELPYT | 96 |

P24492473

| | | |
|---|---|---|
| HCDR1 | ENIIH | 97 |
| HCDR2 | WIHPGSGSIKYAQKLQG | 98 |
| HCDR3 | HGGTGRGAMDY | 99 |
| LCDR1 | RASQSVSTSAYAYMH | 100 |
| LCDR2 | LASNLES | 101 |
| LCDR3 | QQSRELPYT | 102 |

P24492474

| | | |
|---|---|---|
| HCDR1 | ENIIH | 103 |
| HCDR2 | WIHPGSGSIKYAQKLQG | 104 |
| HCDR3 | HGGTGRGAMDY | 105 |
| LCDR1 | RASQSVSTSAYSAMH | 106 |
| LCDR2 | LASNLES | 107 |
| LCDR3 | QQSRELPYT | 108 |

P24492475

| | | |
|---|---|---|
| HCDR1 | ENIIH | 109 |
| HCDR2 | WIHPGSGSIKYAQKLQG | 110 |
| HCDR3 | HGGTGRGAMDY | 111 |
| LCDR1 | RASQSVSTSAYSYMA | 112 |
| LCDR2 | LASNLES | 113 |
| LCDR3 | QQSRELPYT | 114 |

P24492476

| | | |
|---|---|---|
| HCDR1 | ENIIH | 115 |
| HCDR2 | WIHPGSGSIKYAQKLQG | 116 |
| HCDR3 | HGGTGRGAMDY | 117 |
| LCDR1 | RASQSVSTSAYSYMH | 118 |
| LCDR2 | AASNLES | 119 |
| LCDR3 | QQSRELPYT | 120 |

P24492477

| | | |
|---|---|---|
| HCDR1 | ENIIH | 121 |
| HCDR2 | WIHPGSGSIKYAQKLQG | 122 |
| HCDR3 | HGGTGRGAMDY | 123 |
| LCDR1 | RASQSVSTSAYSYMH | 124 |
| LCDR2 | LAANLES | 125 |
| LCDR3 | QQSRELPYT | 126 |

P24492478

| | | |
|---|---|---|
| HCDR1 | ENIIH | 127 |
| HCDR2 | WIHPGSGSIKYAQKLQG | 128 |
| HCDR3 | HGGTGRGAMDY | 129 |
| LCDR1 | RASQSVSTSAYSYMH | 130 |
| LCDR2 | LASALES | 131 |
| LCDR3 | QQSRELPYT | 132 |

P24492479

| | | |
|---|---|---|
| HCDR1 | ENIIH | 133 |
| HCDR2 | WIHPGSGSIKYAQKLQG | 134 |
| HCDR3 | HGGTGRGAMDY | 135 |
| LCDR1 | RASQSVSTSAYSYMH | 136 |
| LCDR2 | LASNAES | 137 |
| LCDR3 | QQSRELPYT | 138 |

P24492480

| | | |
|---|---|---|
| HCDR1 | ENIIH | 139 |
| HCDR2 | WIHPGSGSIKYAQKLQG | 140 |
| HCDR3 | HGGTGRGAMDY | 141 |
| LCDR1 | RASQSVSTSAYSYMH | 142 |
| LCDR2 | LASNLAS | 143 |
| LCDR3 | QQSRELPYT | 144 |

P24492481

| | | |
|---|---|---|
| HCDR1 | ENIIH | 145 |
| HCDR2 | WIHPGSGSIKYAQKLQG | 146 |
| HCDR3 | HGGTGRGAMDY | 147 |
| LCDR1 | RASQSVSTSAYSYMH | 148 |
| LCDR2 | LASNLEA | 149 |
| LCDR3 | QQSRELPYT | 150 |

P24492482

| | | |
|---|---|---|
| HCDR1 | ENIIH | 151 |
| HCDR2 | WIHPGSGSIKYAQKLQG | 152 |
| HCDR3 | HGGTGRGAMDY | 153 |
| LCDR1 | RASQSVSTSAYSYMH | 154 |
| LCDR2 | LASNLES | 155 |
| LCDR3 | QQARELPYT | 156 |

P24492483

| | | |
|---|---|---|
| HCDR1 | ENIIH | 157 |
| HCDR2 | WIHPGSGSIKYAQKLQG | 158 |
| HCDR3 | HGGTGRGAMDY | 159 |
| LCDR1 | RASQSVSTSAYSYMH | 160 |
| LCDR2 | LASNLES | 161 |
| LCDR3 | QQSAELPYT | 162 |

P24492484

| | | |
|---|---|---|
| HCDR1 | ENIIH | 163 |
| HCDR2 | WIHPGSGSIKYAQKLQG | 164 |
| HCDR3 | HGGTGRGAMDY | 165 |
| LCDR1 | RASQSVSTSAYSYMH | 166 |
| LCDR2 | LASNLES | 167 |
| LCDR3 | QQSRALPYT | 168 |

P24492485

| | | |
|---|---|---|
| HCDR1 | ENIIH | 169 |
| HCDR2 | WIHPGSGSIKYAQKLQG | 170 |
| HCDR3 | HGGTGRGAMDY | 171 |
| LCDR1 | RASQSVSTSAYSYMH | 172 |
| LCDR2 | LASNLES | 173 |
| LCDR3 | QQSREAPYT | 174 |

P24492537

| | | |
|---|---|---|
| HCDR1 | ENIIH | 175 |
| HCDR2 | WIHPGSGSIKYAQKLQG | 176 |
| HCDR3 | HGGTGRGAMDY | 177 |
| LCDR1 | RASQSVSTSAYSYMH | 178 |
| LCDR2 | AASNLES | 179 |
| LCDR3 | QQSREAPYT | 180 |

P24492538

| | | |
|---|---|---|
| HCDR1 | ENIIH | 181 |
| HCDR2 | WIHPGSGSIKYAQKLQG | 182 |
| HCDR3 | HGGTGRGAMDY | 183 |
| LCDR1 | RASQSVSTSAYSYMH | 184 |
| LCDR2 | GASNLES | 185 |
| LCDR3 | QQSREAPYT | 186 |

P24492539

| | | |
|---|---|---|
| HCDR1 | ENIIH | 187 |
| HCDR2 | WIHPGSGSIKYAQKLQG | 188 |
| HCDR3 | HGGTGRGAMDY | 189 |
| LCDR1 | RASQSVSTSAYSYMH | 190 |
| LCDR2 | GASNLES | 191 |
| LCDR3 | QQSREYPYT | 192 |

P24502158

| | | |
|---|---|---|
| HCDR1 | ANIIH | 193 |
| HCDR2 | WIHPGSGSIKYAQKLQG | 194 |
| HCDR3 | HGGTGRGAMDY | 195 |
| LCDR1 | RASQSVSTSAYSYMH | 196 |
| LCDR2 | ASNLES | 197 |
| LCDR3 | QQSRELPYT | 198 |

P24502476

| | | |
|---|---|---|
| HCDR1 | ANIIH | 199 |
| HCDR2 | WIHPGSGSIKYAQKLQG | 200 |
| HCDR3 | HGGTGRGAMDY | 201 |
| LCDR1 | RASQSVSTSAYSYMH | 202 |
| LCDR2 | AASNLES | 203 |
| LCDR3 | QQSRELPYT | 204 |

P24502485

| | | |
|---|---|---|
| HCDR1 | ANIIH | 205 |
| HCDR2 | WIHPGSGSIKYAQKLQG | 206 |
| HCDR3 | HGGTGRGAMDY | 207 |
| LCDR1 | RASQSVSTSAYSYMH | 208 |
| LCDR2 | LASNLES | 209 |
| LCDR3 | QQSREAPYT | 210 |

P24502537

| | | |
|---|---|---|
| HCDR1 | ANIIH | 211 |
| HCDR2 | WIHPGSGSIKYAQKLQG | 212 |
| HCDR3 | HGGTGRGAMDY | 213 |
| LCDR1 | RASQSVSTSAYSYMH | 214 |
| LCDR2 | AASNLES | 215 |
| LCDR3 | QQSREAPYT | 216 |

P24502538

| | | |
|---|---|---|
| HCDR1 | ANIIH | 217 |
| HCDR2 | WIHPGSGSIKYAQKLQG | 218 |
| HCDR3 | HGGTGRGAMDY | 219 |
| LCDR1 | RASQSVSTSAYSYMH | 220 |
| LCDR2 | GASNLES | 221 |
| LCDR3 | QQSREAPYT | 222 |

P24502539

| | | |
|---|---|---|
| HCDR1 | ANIIH | 223 |
| HCDR2 | WIHPGSGSIKYAQKLQG | 224 |
| HCDR3 | HGGTGRGAMDY | 225 |
| LCDR1 | RASQSVSTSAYSYMH | 226 |
| LCDR2 | GASNLES | 227 |
| LCDR3 | QQSREYPYT | 228 |

P24512158

| | | |
|---|---|---|
| HCDR1 | EAIIH | 229 |
| HCDR2 | WIHPGSGSIKYAQKLQG | 230 |
| HCDR3 | HGGTGRGAMDY | 231 |
| LCDR1 | RASQSVSTSAYSYMH | 232 |
| LCDR2 | LASNLES | 233 |
| LCDR3 | QQSRELPYT | 234 |

P24512476

| | | |
|---|---|---|
| HCDR1 | EAIIH | 235 |
| HCDR2 | WIHPGSGSIKYAQKLQG | 236 |
| HCDR3 | HGGTGRGAMDY | 237 |
| LCDR1 | RASQSVSTSAYSYMH | 238 |
| LCDR2 | AASNLES | 239 |
| LCDR3 | QQSRELPYT | 240 |

P24512485

| | | |
|---|---|---|
| HCDR1 | EAIIH | 241 |
| HCDR2 | WIHPGSGSIKYAQKLQG | 242 |
| HCDR3 | HGGTGRGAMDY | 243 |
| LCDR1 | RASQSVSTSAYSYMH | 244 |
| LCDR2 | LASNLES | 245 |
| LCDR3 | QQSREAPYT | 246 |

P24522158

| | | |
|---|---|---|
| HCDR1 | ENAIH | 247 |
| HCDR2 | WIHPGSGSIKYAQKLQG | 248 |
| HCDR3 | HGGTGRGAMDY | 249 |
| LCDR1 | RASQSVSTSAYSYMH | 250 |
| LCDR2 | LASNLES | 251 |
| LCDR3 | QQSRELPYT | 252 |

P24532158

| | | |
|---|---|---|
| HCDR1 | ENIAH | 253 |
| HCDR2 | WIHPGSGSIKYAQKLQG | 254 |
| HCDR3 | HGGTGRGAMDY | 255 |
| LCDR1 | RASQSVSTSAYSYMH | 256 |
| LCDR2 | LASNLES | 257 |
| LCDR3 | QQSRELPYT | 258 |

P24542158

| | | |
|---|---|---|
| HCDR1 | ENIIA | 259 |
| HCDR2 | WIHPGSGSIKYAQKLQG | 260 |
| HCDR3 | HGGTGRGAMDY | 261 |
| LCDR1 | RASQSVSTSAYSYMH | 262 |
| LCDR2 | LASNLES | 263 |
| LCDR3 | QQSRELPYT | 264 |

P24552158

| | | |
|---|---|---|
| HCDR1 | ENIIH | 265 |
| HCDR2 | WIAPGSGSIKYAQKLQG | 266 |
| HCDR3 | HGGTGRGAMDY | 267 |
| LCDR1 | RASQSVSTSAYSYMH | 268 |
| LCDR2 | LASNLES | 269 |
| LCDR3 | QQSRELPYT | 270 |

P24562158

| | | |
|---|---|---|
| HCDR1 | ENIIH | 271 |
| HCDR2 | WIHAGSGSIKYAQKLQG | 272 |
| HCDR3 | HGGTGRGAMDY | 273 |
| LCDR1 | RASQSVSTSAYSYMH | 274 |
| LCDR2 | LASNLES | 275 |
| LCDR3 | QQSRELPYT | 276 |

P24572158

| | | |
|---|---|---|
| HCDR1 | ENIIH | 277 |
| HCDR2 | WIHPASGSIKYAQKLQG | 278 |
| HCDR3 | HGGTGRGAMDY | 279 |
| LCDR1 | RASQSVSTSAYSYMH | 280 |
| LCDR2 | LASNLES | 281 |
| LCDR3 | QQSRELPYT | 282 |

P24582158

| | | |
|---|---|---|
| HCDR1 | ENIIH | 283 |
| HCDR2 | WIHPGAGSIKYAQKLQG | 284 |
| HCDR3 | HGGTGRGAMDY | 285 |
| LCDR1 | RASQSVSTSAYSYMH | 286 |
| LCDR2 | LASNLES | 287 |
| LCDR3 | QQSRELPYT | 288 |

P24592158

| | | |
|---|---|---|
| HCDR1 | ENIIH | 289 |
| HCDR2 | WIHPGSASIKYAQKLQG | 290 |
| HCDR3 | HGGTGRGAMDY | 291 |
| LCDR1 | RASQSVSTSAYSYMH | 292 |
| LCDR2 | LASNLES | 293 |
| LCDR3 | QQSRELPYT | 294 |

P24602158

| | | |
|---|---|---|
| HCDR1 | ENIIH | 295 |
| HCDR2 | WIHPGSGAIKYAQKLQG | 296 |
| HCDR3 | HGGTGRGAMDY | 297 |
| LCDR1 | RASQSVSTSAYSYMH | 298 |
| LCDR2 | LASNLES | 299 |
| LCDR3 | QQSRELPYT | 300 |

P24602537

| | | |
|---|---|---|
| HCDR1 | ENIIH | 301 |
| HCDR2 | WIHPGSGAIKYAQKLQG | 302 |
| HCDR3 | HGGTGRGAMDY | 303 |
| LCDR1 | RASQSVSTSAYSYMH | 304 |
| LCDR2 | AASNLES | 305 |
| LCDR3 | QQSREAPYT | 306 |

P24602538

| | | |
|---|---|---|
| HCDR1 | ENIIH | 307 |
| HCDR2 | WIHPGSGAIKYAQKLQG | 308 |
| HCDR3 | HGGTGRGAMDY | 309 |
| LCDR1 | RASQSVSTSAYSYMH | 310 |
| LCDR2 | GASNLES | 311 |
| LCDR3 | QQSREAPYT | 312 |

P24602539

| | | |
|---|---|---|
| HCDR1 | ENIIH | 313 |
| HCDR2 | WIHPGSGAIKYAQKLQG | 314 |
| HCDR3 | HGGTGRGAMDY | 315 |
| LCDR1 | RASQSVSTSAYSYMH | 316 |
| LCDR2 | GASNLES | 317 |
| LCDR3 | QQSREYPYT | 318 |

P24612158

| | | |
|---|---|---|
| HCDR1 | ENIIH | 319 |
| HCDR2 | WIHPGSASIKYAQKLQG | 320 |
| HCDR3 | HGGTGRGAMDY | 321 |
| LCDR1 | RASQSVSTSAYSYMH | 322 |
| LCDR2 | LASNLES | 323 |
| LCDR3 | QQSRELPYT | 324 |

P24622158

| | | |
|---|---|---|
| HCDR1 | ENIIH | 325 |
| HCDR2 | WIHPGSGSIAYAQKLQG | 326 |
| HCDR3 | HGGTGRGAMDY | 327 |
| LCDR1 | RASQSVSTSAYSYMH | 328 |
| LCDR2 | LASNLES | 329 |
| LCDR3 | QQSRELPYT | 330 |

P24632158

| | | |
|---|---|---|
| HCDR1 | ENIIH | 331 |
| HCDR2 | WIHPGSGSIKYAQKLQG | 332 |
| HCDR3 | AGGTGRGAMDY | 333 |
| LCDR1 | RASQSVSTSAYSYMH | 334 |
| LCDR2 | LASNLES | 335 |
| LCDR3 | QQSRELPYT | 336 |

P24642158

| | | |
|---|---|---|
| HCDR1 | ENIIH | 337 |
| HCDR2 | WIHPGSGSIKYAQKLQG | 338 |
| HCDR3 | HAGTGRGAMDY | 339 |
| LCDR1 | RASQSVSTSAYSYMH | 340 |
| LCDR2 | LASNLES | 341 |
| LCDR3 | QQSRELPYT | 342 |

P24652158

| | | |
|---|---|---|
| HCDR1 | ENIIH | 343 |
| HCDR2 | WIHPGSGSIKYAQKLQG | 344 |
| HCDR3 | HGATGRGAMDY | 345 |
| LCDR1 | RASQSVSTSAYSYMH | 346 |
| LCDR2 | LASNLES | 347 |
| LCDR3 | QQSRELPYT | 348 |

P24662158

| | | |
|---|---|---|
| HCDR1 | ENIIH | 349 |
| HCDR2 | WIHPGSGSIKYAQKLQG | 350 |
| HCDR3 | HGGAGRGAMDY | 351 |
| LCDR1 | RASQSVSTSAYSYMH | 352 |
| LCDR2 | LASNLES | 353 |
| LCDR3 | QQSRELPYT | 354 |

P24672158

| | | |
|---|---|---|
| HCDR1 | ENIIH | 355 |
| HCDR2 | WIHPGSGSIKYAQKLQG | 356 |
| HCDR3 | HGGTARGAMDY | 357 |
| LCDR1 | RASQSVSTSAYSYMH | 358 |
| LCDR2 | LASNLES | 359 |
| LCDR3 | QQSRELPYT | 360 |

P24682158

| | | |
|---|---|---|
| HCDR1 | ENIIH | 361 |
| HCDR2 | WIHPGSGSIKYAQKLQG | 362 |
| HCDR3 | HGGTGAGAMDY | 363 |
| LCDR1 | RASQSVSTSAYSYMH | 364 |
| LCDR2 | LASNLES | 365 |
| LCDR3 | QQSRELPYT | 366 |

P24692158

| | | |
|---|---|---|
| HCDR1 | ENIIH | 367 |
| HCDR2 | WIHPGSGSIKYAQKLQG | 368 |
| HCDR3 | HGGTGRAAMDY | 369 |
| LCDR1 | RASQSVSTSAYSYMH | 370 |
| LCDR2 | LASNLES | 371 |
| LCDR3 | QQSRELPYT | 372 |

P25352158

| | | |
|---|---|---|
| HCDR1 | ANIIH | 373 |
| HCDR2 | WIHPGSGAIKYAQKLQG | 374 |
| HCDR3 | HGGTGRGAMDY | 375 |
| LCDR1 | RASQSVSTSAYSYMH | 376 |
| LCDR2 | LASNLES | 377 |
| LCDR3 | QQSRELPYT | 378 |

P25352476

| | | |
|---|---|---|
| HCDR1 | ANIIH | 379 |
| HCDR2 | WIHPGSGAIKYAQKLQG | 380 |
| HCDR3 | HGGTGRGAMDY | 381 |
| LCDR1 | RASQSVSTSAYSYMH | 382 |
| LCDR2 | AASNLES | 383 |
| LCDR3 | QQSRELPYT | 384 |

P25352485

| | | |
|---|---|---|
| HCDR1 | ANIIH | 385 |
| HCDR2 | WIHPGSGAIKYAQKLQG | 386 |
| HCDR3 | HGGTGRGAMDY | 387 |
| LCDR1 | RASQSVSTSAYSYMH | 388 |
| LCDR2 | LASNLES | 389 |
| LCDR3 | QQSREAPYT | 390 |

P25352537

| | | |
|---|---|---|
| HCDR1 | ANIIH | 391 |
| HCDR2 | WIHPGSGAIKYAQKLQG | 392 |
| HCDR3 | HGGTGRGAMDY | 393 |
| LCDR1 | RASQSVSTSAYSYMH | 394 |
| LCDR2 | AASNLES | 395 |
| LCDR3 | QQSREAPYT | 396 |

P25352538

| | | |
|---|---|---|
| HCDR1 | ANIIH | 397 |
| HCDR2 | WIHPGSGAIKYAQKLQG | 398 |
| HCDR3 | HGGTGRGAMDY | 399 |
| LCDR1 | RASQSVSTSAYSYMH | 400 |
| LCDR2 | GASNLES | 401 |
| LCDR3 | QQSREAPYT | 402 |

P25352539

| | | |
|---|---|---|
| HCDR1 | ANIIH | 403 |
| HCDR2 | WIHPGSGAIKYAQKLQG | 404 |
| HCDR3 | HGGTGRGAMDY | 405 |
| LCDR1 | RASQSVSTSAYSYMH | 406 |
| LCDR2 | GASNLES | 407 |
| LCDR3 | QQSREYPYT | 408 |

P25362158

| | | |
|---|---|---|
| HCDR1 | SNIIH | 409 |
| HCDR2 | WIHPGSGAIKYAQKLQG | 410 |
| HCDR3 | HGGTGRGAMDY | 411 |
| LCDR1 | RASQSVSTSAYSYMH | 412 |
| LCDR2 | LASNLES | 413 |
| LCDR3 | QQSRELPYT | 414 |

P25362476

| | | |
|---|---|---|
| HCDR1 | SNIIH | 415 |
| HCDR2 | WIHPGSGAIKYAQKLQG | 416 |
| HCDR3 | HGGTGRGAMDY | 417 |
| LCDR1 | RASQSVSTSAYSYMH | 418 |
| LCDR2 | AASNLES | 419 |
| LCDR3 | QQSRELPYT | 420 |

P25362485

| | | |
|---|---|---|
| HCDR1 | SNIIH | 421 |
| HCDR2 | WIHPGSGAIKYAQKLQG | 422 |
| HCDR3 | HGGTGRGAMDY | 423 |
| LCDR1 | RASQSVSTSAYSYMH | 424 |
| LCDR2 | LASNLES | 425 |
| LCDR3 | QQSREAPY | 426 |

P25362537

| | | |
|---|---|---|
| HCDR1 | SNIIH | 427 |
| HCDR2 | WIHPGSGAIKYAQKLQG | 428 |
| HCDR3 | HGGTGRGAMDY | 429 |
| LCDR1 | RASQSVSTSAYSYMH | 430 |
| LCDR2 | AASNLES | 431 |
| LCDR3 | QQSREAPYT | 432 |

P25362538

| | | |
|---|---|---|
| HCDR1 | SNIIH | 433 |
| HCDR2 | WIHPGSGAIKYAQKLQG | 434 |
| HCDR3 | HGGTGRGAMDY | 435 |
| LCDR1 | RASQSVSTSAYSYMH | 436 |
| LCDR2 | GASNLES | 437 |
| LCDR3 | QQSREAPYT | 438 |

P25362539

| | | |
|---|---|---|
| HCDR1 | SNIIH | 439 |
| HCDR2 | WIHPGSGAIKYAQKLQG | 440 |
| HCDR3 | HGGTGRGAMDY | 441 |
| LCDR1 | RASQSVSTSAYSYMH | 442 |
| LCDR2 | GASNLES | 443 |
| LCDR3 | QQSREYPYT | 444 |

P26292158

| | | |
|---|---|---|
| HCDR1 | ANIIH | 445 |
| HCDR2 | WIHPGSGSIKYAQKLQG | 446 |
| HCDR3 | HGGTGRGAMDY | 447 |
| LCDR1 | RASQSVSTSAYSYMH | 448 |
| LCDR2 | LASNLES | 449 |
| LCDR3 | QQSRELPYT | 450 |

P26292485

| | | |
|---|---|---|
| HCDR1 | ANIIH | 451 |
| HCDR2 | WIHPGSGSIKYAQKLQG | 452 |
| HCDR3 | HGGTGRGAMDY | 453 |
| LCDR1 | RASQSVSTSAYSYMH | 454 |
| LCDR2 | LASNLES | 455 |
| LCDR3 | QQSREAPYT | 456 |

P26302158

| | | |
|---|---|---|
| HCDR1 | ENAIH | 457 |
| HCDR2 | WIHPGSGSIKYAQKLQG | 458 |
| HCDR3 | HGGTGRGAMDY | 459 |
| LCDR1 | RASQSVSTSAYSYMH | 460 |
| LCDR2 | LASNLES | 461 |
| LCDR3 | QQSRELPYT | 462 |

P26312158

| | | |
|---|---|---|
| HCDR1 | ENIIH | 463 |
| HCDR2 | WIHPGSGAIKYAQKLQG | 464 |
| HCDR3 | HGGTGRGAMDY | 465 |
| LCDR1 | RASQSVSTSAYSYMH | 466 |
| LCDR2 | LASNLES | 467 |
| LCDR3 | QQSRELPYT | 468 |

P26312537

| | | |
|---|---|---|
| HCDR1 | ENIIH | 469 |
| HCDR2 | WIHPGSGAIKYAQKLQG | 470 |
| HCDR3 | HGGTGRGAMDY | 471 |
| LCDR1 | RASQSVSTSAYSYMH | 472 |
| LCDR2 | AASNLES | 473 |
| LCDR3 | QQSREAPYT | 474 |

P26312538

| | | |
|---|---|---|
| HCDR1 | ENIIH | 475 |
| HCDR2 | WIHPGSGAIKYAQKLQG | 476 |
| HCDR3 | HGGTGRGAMDY | 477 |
| LCDR1 | RASQSVSTSAYSYMH | 478 |
| LCDR2 | GASNLES | 479 |
| LCDR3 | QQSREAPYT | 480 |

P26322158

| | | |
|---|---|---|
| HCDR1 | ENIIH | 481 |
| HCDR2 | WIHPGSGSIKYAQKLQG | 482 |
| HCDR3 | HGGTGRAAMDY | 483 |
| LCDR1 | RASQSVSTSAYSYMH | 484 |
| LCDR2 | LASNLES | 485 |
| LCDR3 | QQSRELPYT | 486 |

P26332158

| | | |
|---|---|---|
| HCDR1 | ENIIH | 487 |
| HCDR2 | WIHPGSGSIKYAQKLQG | 488 |
| HCDR3 | HGGTGRAAMDY | 489 |
| LCDR1 | RASQSVSTSAYSYMH | 490 |
| LCDR2 | LASNLES | 491 |
| LCDR3 | QQSRELPYT | 492 |

P26342472

| | | |
|---|---|---|
| HCDR1 | ENIIH | 493 |
| HCDR2 | WIHPGSGSIKYAQKLQG | 494 |
| HCDR3 | HGGTGRGAMDY | 495 |
| LCDR1 | RASQSVSTSAASYMH | 496 |
| LCDR2 | ASNLES | 497 |
| LCDR3 | QQSRELPYT | 498 |

P26342476

| | | |
|---|---|---|
| HCDR1 | ENIIH | 499 |
| HCDR2 | WIHPGSGSIKYAQKLQG | 500 |
| HCDR3 | HGGTGRGAMDY | 501 |
| LCDR1 | RASQSVSTSAYSYMH | 502 |
| LCDR2 | AASNLES | 503 |
| LCDR3 | QQSRELPYT | 504 |

P26342482

| | | |
|---|---|---|
| HCDR1 | ENIIH | 505 |
| HCDR2 | WIHPGSGSIKYAQKLQG | 506 |
| HCDR3 | HGGTGRGAMDY | 507 |
| LCDR1 | RASQSVSTSAYSYMH | 508 |
| LCDR2 | LASNLES | 509 |
| LCDR3 | QQARELPYT | 510 |

P26342485

| | | |
|---|---|---|
| HCDR1 | ENIIH | 511 |
| HCDR2 | WIHPGSGSIKYAQKLQG | 512 |
| HCDR3 | HGGTGRGAMDY | 513 |
| LCDR1 | RASQSVSTSAYSYMH | 514 |
| LCDR2 | LASNLES | 515 |
| LCDR3 | QQSREAPYT | 516 |

P26352158

| | | |
|---|---|---|
| HCDR1 | SNIIH | 517 |
| HCDR2 | WIHPGSGAIKYAQKLQG | 518 |
| HCDR3 | HGGTGRGAMDY | 519 |
| LCDR1 | RASQSVSTSAYSYMH | 520 |
| LCDR2 | LASNLES | 521 |
| LCDR3 | QQSRELPYT | 522 |

P26352538

| | | |
|---|---|---|
| HCDR1 | SNIIH | 523 |
| HCDR2 | WIHPGSGAIKYAQKLQG | 524 |
| HCDR3 | HGGTGRGAMDY | 525 |
| LCDR1 | RASQSVSTSAYSYMH | 526 |
| LCDR2 | GASNLES | 527 |
| LCDR3 | QQSREAPYT | 528 |

P26362537

| | | |
|---|---|---|
| HCDR1 | ANIIH | 529 |
| HCDR2 | WIHPGSGAIKYAQKLQG | 530 |
| HCDR3 | HGGTGRGAMDY | 531 |
| LCDR1 | RASQSVSTSAYSYMH | 532 |
| LCDR2 | AASNLES | 533 |
| LCDR3 | QQSREAPYT | 534 |

P26372538

| | | |
|---|---|---|
| HCDR1 | SNIIH | 535 |
| HCDR2 | WIHPGSGAIKYAQKLQG | 536 |
| HCDR3 | HGGTGRGAMDY | 537 |
| LCDR1 | RASQSVSTSAYSYMH | 538 |
| LCDR2 | GASNLES | 539 |
| LCDR3 | QQSREAPYT | 540 |

P28742158

| | | |
|---|---|---|
| HCDR1 | SNIIH | 541 |
| HCDR2 | WFHPGSGAIKYAQKLQG | 542 |
| HCDR3 | HGGTGRGAMDY | 543 |
| LCDR1 | RASQSVSTSAYSYMH | 544 |
| LCDR2 | LASNLES | 545 |
| LCDR3 | QQSRELPYT | 546 |

P28752158

| | | |
|---|---|---|
| HCDR1 | DNIIH | 547 |
| HCDR2 | WIHPGSGAIKYAQKLQG | 548 |
| HCDR3 | HGGTGRGAMDY | 549 |
| LCDR1 | RASQSVSTSAYSYMH | 550 |
| LCDR2 | LASNLES | 551 |
| LCDR3 | QQSRELPYT | 552 |

P28762158

| | | |
|---|---|---|
| HCDR1 | ENIIH | 553 |
| HCDR2 | WIHPGSGAIKYAQKLQG | 554 |
| HCDR3 | HGGTGRGAMDY | 555 |
| LCDR1 | RASQSVSTSAYSYMH | 556 |
| LCDR2 | LASNLES | 557 |
| LCDR3 | QQSRELPYT | 558 |

P28772158

| | | |
|---|---|---|
| HCDR1 | FNIIH | 559 |
| HCDR2 | WIHPGSGAIKYAQKLQG | 560 |
| HCDR3 | HGGTGRGAMDY | 561 |
| LCDR1 | RASQSVSTSAYSYMH | 562 |
| LCDR2 | LASNLES | 563 |
| LCDR3 | QQSRELPYT | 564 |

P28782158

| | | |
|---|---|---|
| HCDR1 | GNIIH | 565 |
| HCDR2 | WIHPGSGAIKYAQKLQG | 566 |
| HCDR3 | HGGTGRGAMDY | 567 |
| LCDR1 | RASQSVSTSAYSYMH | 568 |
| LCDR2 | LASNLES | 569 |
| LCDR3 | QQSRELPYT | 570 |

P28792158

| | | |
|---|---|---|
| HCDR1 | HNIIH | 571 |
| HCDR2 | WIHPGSGAIKYAQKLQG | 572 |
| HCDR3 | HGGTGRGAMDY | 573 |
| LCDR1 | RASQSVSTSAYSYMH | 574 |
| LCDR2 | LASNLES | 575 |
| LCDR3 | QQSRELPYT | 576 |

P28802158

| | | |
|---|---|---|
| HCDR1 | INIIH | 577 |
| HCDR2 | WIHPGSGAIKYAQKLQG | 578 |
| HCDR3 | HGGTGRGAMDY | 579 |
| LCDR1 | RASQSVSTSAYSYMH | 580 |
| LCDR2 | LASNLES | 581 |
| LCDR3 | QQSRELPYT | 582 |

P28812158

| | | |
|---|---|---|
| HCDR1 | KNIIH | 583 |
| HCDR2 | WIHPGSGAIKYAQKLQG | 584 |
| HCDR3 | HGGTGRGAMDY | 585 |
| LCDR1 | RASQSVSTSAYSYMH | 586 |
| LCDR2 | LASNLES | 587 |
| LCDR3 | QQSRELPYT | 588 |

P28822158

| | | |
|---|---|---|
| HCDR1 | LNIIH | 589 |
| HCDR2 | WIHPGSGAIKYAQKLQG | 590 |
| HCDR3 | HGGTGRGAMDY | 591 |
| LCDR1 | RASQSVSTSAYSYMH | 592 |
| LCDR2 | LASNLES | 593 |
| LCDR3 | QQSRELPYT | 594 |

P28832158

| | | |
|---|---|---|
| HCDR1 | MNIIH | 595 |
| HCDR2 | WIHPGSGAIKYAQKLQG | 596 |
| HCDR3 | HGGTGRGAMDY | 597 |
| LCDR1 | RASQSVSTSAYSYMH | 598 |
| LCDR2 | LASNLES | 599 |
| LCDR3 | QQSRELPYT | 600 |

P28842158

| | | |
|---|---|---|
| HCDR1 | NNIIH | 601 |
| HCDR2 | WIHPGSGAIKYAQKLQG | 602 |
| HCDR3 | HGGTGRGAMDY | 603 |
| LCDR1 | RASQSVSTSAYSYMH | 604 |
| LCDR2 | LASNLES | 605 |
| LCDR3 | QQSRELPYT | 606 |

P28852158

| | | |
|---|---|---|
| HCDR1 | PNIIH | 607 |
| HCDR2 | WIHPGSGAIKYAQKLQG | 608 |
| HCDR3 | HGGTGRGAMDY | 609 |
| LCDR1 | RASQSVSTSAYSYMH | 610 |
| LCDR2 | LASNLES | 611 |
| LCDR3 | QQSRELPYT | 612 |

P28862158

| | | |
|---|---|---|
| HCDR1 | QNIIH | 613 |
| HCDR2 | WIHPGSGAIKYAQKLQG | 614 |
| HCDR3 | HGGTGRGAMDY | 615 |
| LCDR1 | RASQSVSTSAYSYMH | 616 |
| LCDR2 | LASNLES | 617 |
| LCDR3 | QQSRELPYT | 618 |

P28872158

| | | |
|---|---|---|
| HCDR1 | RNIIH | 619 |
| HCDR2 | WIHPGSGAIKYAQKLQG | 620 |
| HCDR3 | HGGTGRGAMDY | 621 |
| LCDR1 | RASQSVSTSAYSYMH | 622 |
| LCDR2 | LASNLES | 623 |
| LCDR3 | QQSRELPYT | 624 |

P28882158

| | | |
|---|---|---|
| HCDR1 | TNIIH | 625 |
| HCDR2 | WIHPGSGAIKYAQKLQG | 626 |
| HCDR3 | HGGTGRGAMDY | 627 |
| LCDR1 | RASQSVSTSAYSYMH | 628 |
| LCDR2 | LASNLES | 629 |
| LCDR3 | QQSRELPYT | 630 |

P28892158

| | | |
|---|---|---|
| HCDR1 | VNIIH | 631 |
| HCDR2 | WIHPGSGAIKYAQKLQG | 632 |
| HCDR3 | HGGTGRGAMDY | 633 |
| LCDR1 | ASQSVSTSAYSYMH | 634 |
| LCDR2 | LASNLES | 635 |
| LCDR3 | QQSRELPYT | 636 |

P28902158

| | | |
|---|---|---|
| HCDR1 | WNIIH | 637 |
| HCDR2 | WIHPGSGAIKYAQKLQG | 638 |
| HCDR3 | HGGTGRGAMDY | 639 |
| LCDR1 | RASQSVSTSAYSYMH | 640 |
| LCDR2 | LASNLES | 641 |
| LCDR3 | QQSRELPYT | 642 |

P28912158

| | | |
|---|---|---|
| HCDR1 | YNIIH | 643 |
| HCDR2 | WIHPGSGAIKYAQKLQG | 644 |
| HCDR3 | HGGTGRGAMDY | 645 |
| LCDR1 | RASQSVSTSAYSYMH | 646 |
| LCDR2 | LASNLES | 647 |
| LCDR3 | QQSRELPYT | 648 |

P28922158

| | | |
|---|---|---|
| HCDR1 | SNIIH | 649 |
| HCDR2 | WIHPGSGDIKYAQKLQG | 650 |
| HCDR3 | HGGTGRGAMDY | 651 |
| LCDR1 | RASQSVSTSAYSYMH | 652 |
| LCDR2 | LASNLES | 653 |
| LCDR3 | QQSRELPYT | 654 |

P28932158

| | | |
|---|---|---|
| HCDR1 | SNIIH | 655 |
| HCDR2 | WIHPGSGEIKYAQKLQG | 656 |
| HCDR3 | HGGTGRGAMDY | 657 |
| LCDR1 | RASQSVSTSAYSYMH | 658 |
| LCDR2 | LASNLES | 659 |
| LCDR3 | QQSRELPYT | 660 |

P28942158

| | | |
|---|---|---|
| HCDR1 | SNIIH | 661 |
| HCDR2 | WIHPGSGFIKYAQKLQG | 662 |
| HCDR3 | HGGTGRGAMDY | 663 |
| LCDR1 | RASQSVSTSAYSYMH | 664 |
| LCDR2 | LASNLES | 665 |
| LCDR3 | QQSRELPYT | 666 |

P28952158

| | | |
|---|---|---|
| HCDR1 | SNIIH | 667 |
| HCDR2 | WIHPGSGGIKYAQKLQG | 668 |
| HCDR3 | HGGTGRGAMDY | 669 |
| LCDR1 | RASQSVSTSAYSYMH | 670 |
| LCDR2 | LASNLES | 671 |
| LCDR3 | QQSRELPYT | 672 |

P28962158

| | | |
|---|---|---|
| HCDR1 | SNIIH | 673 |
| HCDR2 | WIHPGSGHIKYAQKLQG | 674 |
| HCDR3 | HGGTGRGAMDY | 675 |
| LCDR1 | RASQSVSTSAYSYMH | 676 |
| LCDR2 | LASNLES | 677 |
| LCDR3 | QQSRELPYT | 678 |

P28972158

| | | |
|---|---|---|
| HCDR1 | SNIIH | 679 |
| HCDR2 | WIHPGSGIIKYAQKLQG | 680 |
| HCDR3 | HGGTGRGAMDY | 681 |
| LCDR1 | RASQSVSTSAYSYMH | 682 |
| LCDR2 | LASNLES | 683 |
| LCDR3 | QQSRELPYT | 684 |

P28982158

| | | |
|---|---|---|
| HCDR1 | SNIIH | 685 |
| HCDR2 | WIHPGSGKIKYAQKLQG | 686 |
| HCDR3 | HGGTGRGAMDY | 687 |
| LCDR1 | RASQSVSTSAYSYMH | 688 |
| LCDR2 | LASNLES | 689 |
| LCDR3 | QQSRELPYT | 690 |

P28992158

| | | |
|---|---|---|
| HCDR1 | SNIIH | 691 |
| HCDR2 | WIHPGSGLIKYAQKLQG | 692 |
| HCDR3 | HGGTGRGAMDY | 693 |
| LCDR1 | RASQSVSTSAYSYMH | 694 |
| LCDR2 | LASNLES | 695 |
| LCDR3 | QQSRELPYT | 696 |

P29002158

| | | |
|---|---|---|
| HCDR1 | SNIIH | 697 |
| HCDR2 | WIHPGSGMIKYAQKLQG | 698 |
| HCDR3 | HGGTGRGAMDY | 699 |
| LCDR1 | RASQSVSTSAYSYMH | 700 |
| LCDR2 | LASNLES | 701 |
| LCDR3 | QQSRELPYT | 702 |

P29012158

| | | |
|---|---|---|
| HCDR1 | SNIIH | 703 |
| HCDR2 | WIHPGSGNIKYAQKLQG | 704 |
| HCDR3 | HGGTGRGAMDY | 705 |
| LCDR1 | RASQSVSTSAYSYMH | 706 |
| LCDR2 | LASNLES | 707 |
| LCDR3 | QQSRELPYT | 708 |

P29022158

| | | |
|---|---|---|
| HCDR1 | SNIIH | 709 |
| HCDR2 | WIHPGSGPIKYAQKLQG | 710 |
| HCDR3 | HGGTGRGAMDY | 711 |
| LCDR1 | RASQSVSTSAYSYMH | 712 |
| LCDR2 | LASNLES | 713 |
| LCDR3 | QQSRELPYT | 714 |

P29032158

| | | |
|---|---|---|
| HCDR1 | SNIIH | 715 |
| HCDR2 | WIHPGSGQIKYAQKLQG | 716 |
| HCDR3 | HGGTGRGAMDY | 717 |
| LCDR1 | RASQSVSTSAYSYMH | 718 |
| LCDR2 | LASNLES | 719 |
| LCDR3 | QQSRELPYT | 720 |

P29042158

| | | |
|---|---|---|
| HCDR1 | SNIIH | 721 |
| HCDR2 | WIHPGSGRIKYAQKLQG | 722 |
| HCDR3 | HGGTGRGAMDY | 723 |
| LCDR1 | RASQSVSTSAYSYMH | 724 |
| LCDR2 | LASNLES | 725 |
| LCDR3 | QQSRELPYT | 726 |

P29052158

| | | |
|---|---|---|
| HCDR1 | SNIIH | 727 |
| HCDR2 | WIHPGSGTIKYAQKLQG | 728 |
| HCDR3 | HGGTGRGAMDY | 729 |
| LCDR1 | RASQSVSTSAYSYMH | 730 |
| LCDR2 | LASNLES | 731 |
| LCDR3 | QQSRELPYT | 732 |

P29062158

| | | |
|---|---|---|
| HCDR1 | SNIIH | 733 |
| HCDR2 | WIHPGSGVIKYAQKLQG | 734 |
| HCDR3 | HGGTGRGAMDY | 735 |
| LCDR1 | RASQSVSTSAYSYMH | 736 |
| LCDR2 | LASNLES | 737 |
| LCDR3 | QQSRELPYT | 738 |

P29072158

| | | |
|---|---|---|
| HCDR1 | SNIIH | 739 |
| HCDR2 | WIHPGSGWIKYAQKLQG | 740 |
| HCDR3 | HGGTGRGAMDY | 741 |
| LCDR1 | ASQSVSTSAYSYMH | 742 |
| LCDR2 | LASNLES | 743 |
| LCDR3 | QQSRELPYT | 744 |

P29082158

| | | |
|---|---|---|
| HCDR1 | SNIIH | 745 |
| HCDR2 | WIHPGSGYIKYAQKLQG | 746 |
| HCDR3 | HGGTGRGAMDY | 747 |
| LCDR1 | RASQSVSTSAYSYMH | 748 |
| LCDR2 | LASNLES | 749 |
| LCDR3 | QQSRELPYT | 750 |

[0258] Thus, in certain embodiments, an antibody, or antigen-binding fragment thereof, comprises a heavy chain variable (V_{H}) region comprising V_{H}CDR1, V_{H}CDR2, and V_{H}CDR3 regions selected from Table A1; and a light chain variable (V_{L}) region comprising V_{L}CDR1, V_{L}CDR2, and V_{L}CDR3 regions selected from Table A1.

[0259] In particular embodiments, the CDR regions are as follows:

[0260] the V_{H}CDR1, a V_{H}CDR2, and V_{H}CDR3 regions respectively comprise SEQ ID NOs: 1-3; and the V_{L}CDR1, V_{L}CDR2, and V_{L}CDR3 regions respectively comprise SEQ ID NOs: 4-6;

[0261] the V_{H}CDR1, a V_{H}CDR2, and V_{H}CDR3 regions respectively comprise SEQ ID NOs: 7-9; and

[0262] the V_{L}CDR1, V_{L}CDR2, and V_{L}CDR3 regions respectively comprise SEQ ID NOs: 10-12;

[0263] the V_{H}CDR1, a V_{H}CDR2, and V_{H}CDR3 regions respectively comprise SEQ ID NOs: 13-15; and the V_{L}CDR1, V_{L}CDR2, and V_{L}CDR3 regions respectively comprise SEQ ID NOs: 16-18;

[0264] the V_{H}CDR1, a V_{H}CDR2, and V_{H}CDR3 regions respectively comprise SEQ ID NOs: 19-21; and the V_{L}CDR1, V_{L}CDR2, and V_{L}CDR3 regions respectively comprise SEQ ID NOs: 22-24;

[0265] the V_{H}CDR1, a V_{H}CDR2, and V_{H}CDR3 regions respectively comprise SEQ ID NOs: 25-27; and the V_{L}CDR1, V_{L}CDR2, and V_{L}CDR3 regions respectively comprise SEQ ID NOs: 28-30;

[0266] the V_{H}CDR1, a V_{H}CDR2, and V_{H}CDR3 regions respectively comprise SEQ ID NOs: 31-33; and the V_{L}CDR1, V_{L}CDR2, and V_{L}CDR3 regions respectively comprise SEQ ID NOs: 34-36;

[0267] the V_{H}CDR1, a V_{H}CDR2, and V_{H}CDR3 regions respectively comprise SEQ ID NOs: 37-39; and the V_{L}CDR1, V_{L}CDR2, and V_{L}CDR3 regions respectively comprise SEQ ID NOs: 40-42;

[0268] the V_{H}CDR1, a V_{H}CDR2, and V_{H}CDR3 regions respectively comprise SEQ ID NOs: 43-45; and the V_{L}CDR1, V_{L}CDR2, and V_{L}CDR3 regions respectively comprise SEQ ID NOs: 46-48;

[0269] the V_{H}CDR1, a V_{H}CDR2, and V_{H}CDR3 regions respectively comprise SEQ ID NOs: 49-51; and the V_{L}CDR1, V_{L}CDR2, and V_{L}CDR3 regions respectively comprise SEQ ID NOs: 52-54;

[0270] the V_{H}CDR1, a V_{H}CDR2, and V_{H}CDR3 regions respectively comprise SEQ ID NOs: 55-57; and the V_{L}CDR1, V_{L}CDR2, and V_{L}CDR3 regions respectively comprise SEQ ID NOs: 58-60;

[0271] the V_{H}CDR1, a V_{H}CDR2, and V_{H}CDR3 regions respectively comprise SEQ ID NOs: 61-63; and the V_{L}CDR1, V_{L}CDR2, and V_{L}CDR3 regions respectively comprise SEQ ID NOs: 64-66;

[0272] the V_{H}CDR1, a V_{H}CDR2, and V_{H}CDR3 regions respectively comprise SEQ ID NOs: 67-69; and the V_{L}CDR1, V_{L}CDR2, and V_{L}CDR3 regions respectively comprise SEQ ID NOs: 70-72;

[0273] the V_{H}CDR1, a V_{H}CDR2, and V_{H}CDR3 regions respectively comprise SEQ ID NOs: 73-75; and the V_{L}CDR1, V_{L}CDR2, and V_{L}CDR3 regions respectively comprise SEQ ID NOs: 76-78;

[0274] the V_{H}CDR1, a V_{H}CDR2, and V_{H}CDR3 regions respectively comprise SEQ ID NOs: 79-81; and the V_{L}CDR1, V_{L}CDR2, and V_{L}CDR3 regions respectively comprise SEQ ID NOs: 82-84;

[0275] the V_{H}CDR1, a V_{H}CDR2, and V_{H}CDR3 regions respectively comprise SEQ ID NOs: 85-87; and the V_{L}CDR1, V_{L}CDR2, and V_{L}CDR3 regions respectively comprise SEQ ID NOs: 88-90;

[0276] the V_{H}CDR1, a V_{H}CDR2, and V_{H}CDR3 regions respectively comprise SEQ ID NOs: 91-93; and the V_{L}CDR1, V_{L}CDR2, and V_{L}CDR3 regions respectively comprise SEQ ID NOs: 94-96;

[0277] the V_{H}CDR1, a V_{H}CDR2, and V_{H}CDR3 regions respectively comprise SEQ ID NOs: 97-99; and the V_{L}CDR1, V_{L}CDR2, and V_{L}CDR3 regions respectively comprise SEQ ID NOs: 100-102;

[0278] the V_{H}CDR1, a V_{H}CDR2, and V_{H}CDR3 regions respectively comprise SEQ ID NOs: 103-105; and the V_{L}CDR1, V_{L}CDR2, and V_{L}CDR3 regions respectively comprise SEQ ID NOs: 106-108;

[0279] the V_{H}CDR1, a V_{H}CDR2, and V_{H}CDR3 regions respectively comprise SEQ ID NOs: 109-111; and the V_{L}CDR1, V_{L}CDR2, and V_{L}CDR3 regions respectively comprise SEQ ID NOs: 112-114;

[0280] the V_{H}CDR1, a V_{H}CDR2, and V_{H}CDR3 regions respectively comprise SEQ ID NOs: 115-117; and the V_{L}CDR1, V_{L}CDR2, and V_{L}CDR3 regions respectively comprise SEQ ID NOs: 118-120;

[0281] the V_{H}CDR1, a V_{H}CDR2, and V_{H}CDR3 regions respectively comprise SEQ ID NOs: 121-123; and the V_{L}CDR1, V_{L}CDR2, and V_{L}CDR3 regions respectively comprise SEQ ID NOs: 124-126;

[0282] the V_{H}CDR1, a V_{H}CDR2, and V_{H}CDR3 regions respectively comprise SEQ ID NOs: 127-129; and the V_{L}CDR1, V_{L}CDR2, and V_{L}CDR3 regions respectively comprise SEQ ID NOs: 130-132;

[0283] the V_{H}CDR1, a V_{H}CDR2, and V_{H}CDR3 regions respectively comprise SEQ ID NOs: 133-135; and the V_{L}CDR1, V_{L}CDR2, and V_{L}CDR3 regions respectively comprise SEQ ID NOs: 136-138;

[0284] the V_{H}CDR1, a V_{H}CDR2, and V_{H}CDR3 regions respectively comprise SEQ ID NOs: 139-141; and the V_{L}CDR1, V_{L}CDR2, and V_{L}CDR3 regions respectively comprise SEQ ID NOs: 142-144;

[0285] the V_{H}CDR1, a V_{H}CDR2, and V_{H}CDR3 regions respectively comprise SEQ ID NOs: 145-147; and the V_{L}CDR1, V_{L}CDR2, and V_{L}CDR3 regions respectively comprise SEQ ID NOs: 148-150;

[0286] the V_{H}CDR1, a V_{H}CDR2, and V_{H}CDR3 regions respectively comprise SEQ ID NOs: 151-153; and the V_{L}CDR1, V_{L}CDR2, and V_{L}CDR3 regions respectively comprise SEQ ID NOs: 154-156;

[0287] the V_{H}CDR1, a V_{H}CDR2, and V_{H}CDR3 regions respectively comprise SEQ ID NOs: 157-159; and the V_{L}CDR1, V_{L}CDR2, and V_{L}CDR3 regions respectively comprise SEQ ID NOs: 160-162;

[0288] the V_{H}CDR1, a V_{H}CDR2, and V_{H}CDR3 regions respectively comprise SEQ ID NOs: 163-165; and the V_{L}CDR1, V_{L}CDR2, and V_{L}CDR3 regions respectively comprise SEQ ID NOs: 166-168;

[0289] the V_{H}CDR1, a V_{H}CDR2, and V_{H}CDR3 regions respectively comprise SEQ ID NOs: 169-171; and the V_{L}CDR1, V_{L}CDR2, and V_{L}CDR3 regions respectively comprise SEQ ID NOs: 172-174;

[0290] the V_{H}CDR1, a V_{H}CDR2, and V_{H}CDR3 regions respectively comprise SEQ ID NOs: 175-177; and the V_{L}CDR1, V_{L}CDR2, and V_{L}CDR3 regions respectively comprise SEQ ID NOs: 178-180;

[0291] the V_{H}CDR1, a V_{H}CDR2, and V_{H}CDR3 regions respectively comprise SEQ ID NOs: 181-183; and the V_{L}CDR1, V_{L}CDR2, and V_{L}CDR3 regions respectively comprise SEQ ID NOs: 184-186;

[0292] the V_{H}CDR1, a V_{H}CDR2, and V_{H}CDR3 regions respectively comprise SEQ ID NOs: 187-189; and the V_{L}CDR1, V_{L}CDR2, and V_{L}CDR3 regions respectively comprise SEQ ID NOs: 190-192;

[0293] the V_{H}CDR1, a V_{H}CDR2, and V_{H}CDR3 regions respectively comprise SEQ ID NOs: 193-195; and the V_{L}CDR1, V_{L}CDR2, and V_{L}CDR3 regions respectively comprise SEQ ID NOs: 196-198;

[0294] the V_{H}CDR1, a V_{H}CDR2, and V_{H}CDR3 regions respectively comprise SEQ ID NOs: 199-201; and the V_{L}CDR1, V_{L}CDR2, and V_{L}CDR3 regions respectively comprise SEQ ID NOs: 202-204;

[0295] the V_{H}CDR1, a V_{H}CDR2, and V_{H}CDR3 regions respectively comprise SEQ ID NOs: 205-207; and the V_{L}CDR1, V_{L}CDR2, and V_{L}CDR3 regions respectively comprise SEQ ID NOs: 208-210;

[0296] the V_{H}CDR1, a V_{H}CDR2, and V_{H}CDR3 regions respectively comprise SEQ ID NOs: 211-213; and the V_{L}CDR1, V_{L}CDR2, and V_{L}CDR3 regions respectively comprise SEQ ID NOs: 214-216;

[0297] the V_{H}CDR1, a V_{H}CDR2, and V_{H}CDR3 regions respectively comprise SEQ ID NOs: 217-219; and the V_{L}CDR1, V_{L}CDR2, and V_{L}CDR3 regions respectively comprise SEQ ID NOs: 220-222;

[0298] the V_{H}CDR1, a V_{H}CDR2, and V_{H}CDR3 regions respectively comprise SEQ ID NOs: 223-225; and the V_{L}CDR1, V_{L}CDR2, and V_{L}CDR3 regions respectively comprise SEQ ID NOs: 226-228;

[0299] the V_{H}CDR1, a V_{H}CDR2, and V_{H}CDR3 regions respectively comprise SEQ ID NOs: 229-231; and the V_{L}CDR1, V_{L}CDR2, and V_{L}CDR3 regions respectively comprise SEQ ID NOs: 232-234;

[0300] the V_{H}CDR1, a V_{H}CDR2, and V_{H}CDR3 regions respectively comprise SEQ ID NOs: 235-237; and the V_{L}CDR1, V_{L}CDR2, and V_{L}CDR3 regions respectively comprise SEQ ID NOs: 238-240;

[0301] the V_{H}CDR1, a V_{H}CDR2, and V_{H}CDR3 regions respectively comprise SEQ ID NOs: 241-243; and the V_{L}CDR1, V_{L}CDR2, and V_{L}CDR3 regions respectively comprise SEQ ID NOs: 244-246;

[0302] the V_{H}CDR1, a V_{H}CDR2, and V_{H}CDR3 regions respectively comprise SEQ ID NOs: 247-249; and the V_{L}CDR1, V_{L}CDR2, and V_{L}CDR3 regions respectively comprise SEQ ID NOs: 250-252;

[0303] the V_{H}CDR1, a V_{H}CDR2, and V_{H}CDR3 regions respectively comprise SEQ ID NOs: 253-255; and the V_{L}CDR1, V_{L}CDR2, and V_{L}CDR3 regions respectively comprise SEQ ID NOs: 256-258;

[0304] the V_{H}CDR1, a V_{H}CDR2, and V_{H}CDR3 regions respectively comprise SEQ ID NOs: 259-261; and the V_{L}CDR1, V_{L}CDR2, and V_{L}CDR3 regions respectively comprise SEQ ID NOs: 262-264;

[0305] the V_{H}CDR1, a V_{H}CDR2, and V_{H}CDR3 regions respectively comprise SEQ ID NOs: 265-267; and the V_{L}CDR1, V_{L}CDR2, and V_{L}CDR3 regions respectively comprise SEQ ID NOs: 268-270;

[0306] the V_{H}CDR1, a V_{H}CDR2, and V_{H}CDR3 regions respectively comprise SEQ ID NOs: 271-273; and the V_{L}CDR1, V_{L}CDR2, and V_{L}CDR3 regions respectively comprise SEQ ID NOs: 274-276;

[0307] the V_{H}CDR1, a V_{H}CDR2, and V_{H}CDR3 regions respectively comprise SEQ ID NOs: 277-279; and the V_{L}CDR1, V_{L}CDR2, and V_{L}CDR3 regions respectively comprise SEQ ID NOs: 280-282;

[0308] the V_{H}CDR1, a V_{H}CDR2, and V_{H}CDR3 regions respectively comprise SEQ ID NOs: 283-285; and the V_{L}CDR1, V_{L}CDR2, and V_{L}CDR3 regions respectively comprise SEQ ID NOs: 286-288;

[0309] the V_{H}CDR1, a V_{H}CDR2, and V_{H}CDR3 regions respectively comprise SEQ ID NOs: 289-291; and the V_{L}CDR1, V_{L}CDR2, and V_{L}CDR3 regions respectively comprise SEQ ID NOs: 292-294;

[0310] the V_{H}CDR1, a V_{H}CDR2, and V_{H}CDR3 regions respectively comprise SEQ ID NOs: 295-297; and the V_{L}CDR1, V_{L}CDR2, and V_{L}CDR3 regions respectively comprise SEQ ID NOs: 298-300;

[0311] the V_{H}CDR1, a V_{H}CDR2, and V_{H}CDR3 regions respectively comprise SEQ ID NOs: 301-303; and the V_{L}CDR1, V_{L}CDR2, and V_{L}CDR3 regions respectively comprise SEQ ID NOs: 304-306;

[0312] the V_{H}CDR1, a V_{H}CDR2, and V_{H}CDR3 regions respectively comprise SEQ ID NOs: 307-308; and the V_{L}CDR1, V_{L}CDR2, and V_{L}CDR3 regions respectively comprise SEQ ID NOs: 310-312;

[0313] the V_{H}CDR1, a V_{H}CDR2, and V_{H}CDR3 regions respectively comprise SEQ ID NOs: 313-315; and the V_{L}CDR1, V_{L}CDR2, and V_{L}CDR3 regions respectively comprise SEQ ID NOs: 316-318;

[0314] the V_{H}CDR1, a V_{H}CDR2, and V_{H}CDR3 regions respectively comprise SEQ ID NOs: 319-321; and the V_{L}CDR1, V_{L}CDR2, and V_{L}CDR3 regions respectively comprise SEQ ID NOs: 322-324;

[0315] the V_{H}CDR1, a V_{H}CDR2, and V_{H}CDR3 regions respectively comprise SEQ ID NOs: 325-327; and the V_{L}CDR1, V_{L}CDR2, and V_{L}CDR3 regions respectively comprise SEQ ID NOs: 328-330;

[0316] the V_{H}CDR1, a V_{H}CDR2, and V_{H}CDR3 regions respectively comprise SEQ ID NOs: 331-333; and the V_{L}CDR1, V_{L}CDR2, and V_{L}CDR3 regions respectively comprise SEQ ID NOs: 334-336;

[0317] the V_{H}CDR1, a V_{H}CDR2, and V_{H}CDR3 regions respectively comprise SEQ ID NOs: 337-339; and the V_{L}CDR1, V_{L}CDR2, and V_{L}CDR3 regions respectively comprise SEQ ID NOs: 340-342;

[0318] the V_{H}CDR1, a V_{H}CDR2, and V_{H}CDR3 regions respectively comprise SEQ ID NOs: 343-345; and the V_{L}CDR1, V_{L}CDR2, and V_{L}CDR3 regions respectively comprise SEQ ID NOs: 346-348;

[0319] the V_{H}CDR1, a V_{H}CDR2, and V_{H}CDR3 regions respectively comprise SEQ ID NOs: 349-351; and the V_{L}CDR1, V_{L}CDR2, and V_{L}CDR3 regions respectively comprise SEQ ID NOs: 352-354;

[0320] the V_{H}CDR1, a V_{H}CDR2, and V_{H}CDR3 regions respectively comprise SEQ ID NOs: 355-357; and the V_{L}CDR1, V_{L}CDR2, and V_{L}CDR3 regions respectively comprise SEQ ID NOs: 358-360;

[0321] the V_{H}CDR1, a V_{H}CDR2, and V_{H}CDR3 regions respectively comprise SEQ ID NOs: 361-363; and the V_{L}CDR1, V_{L}CDR2, and V_{L}CDR3 regions respectively comprise SEQ ID NOs: 364-366;

[0322] the V_{H}CDR1, a V_{H}CDR2, and V_{H}CDR3 regions respectively comprise SEQ ID NOs: 367-369; and the V_{L}CDR1, V_{L}CDR2, and V_{L}CDR3 regions respectively comprise SEQ ID NOs: 370-372;

[0323] the V_{H}CDR1, a V_{H}CDR2, and V_{H}CDR3 regions respectively comprise SEQ ID NOs: 373-375; and the V_{L}CDR1, V_{L}CDR2, and V_{L}CDR3 regions respectively comprise SEQ ID NOs: 376-378;

[0324] the V_{H}CDR1, a V_{H}CDR2, and V_{H}CDR3 regions respectively comprise SEQ ID NOs: 379-381; and the V_{L}CDR1, V_{L}CDR2, and V_{L}CDR3 regions respectively comprise SEQ ID NOs: 382-384;

[0325] the V_{H}CDR1, a V_{H}CDR2, and V_{H}CDR3 regions respectively comprise SEQ ID NOs: 385-387; and the V_{L}CDR1, V_{L}CDR2, and V_{L}CDR3 regions respectively comprise SEQ ID NOs: 388-390;

[0326] the V_{H}CDR1, a V_{H}CDR2, and V_{H}CDR3 regions respectively comprise SEQ ID NOs: 391-393; and the V_{L}CDR1, V_{L}CDR2, and V_{L}CDR3 regions respectively comprise SEQ ID NOs: 394-396;

[0327] the V_{H}CDR1, a V_{H}CDR2, and V_{H}CDR3 regions respectively comprise SEQ ID NOs: 397-399; and the V_{L}CDR1, V_{L}CDR2, and V_{L}CDR3 regions respectively comprise SEQ ID NOs: 400-402;

[0328] the V_{H}CDR1, a V_{H}CDR2, and V_{H}CDR3 regions respectively comprise SEQ ID NOs: 403-405; and the V_{L}CDR1, V_{L}CDR2, and V_{L}CDR3 regions respectively comprise SEQ ID NOs: 406-408;

[0329] the V_{H}CDR1, a V_{H}CDR2, and V_{H}CDR3 regions respectively comprise SEQ ID NOs: 409-411; and the V_{L}CDR1, V_{L}CDR2, and V_{L}CDR3 regions respectively comprise SEQ ID NOs: 412-414;

[0330] the V_{H}CDR1, a V_{H}CDR2, and V_{H}CDR3 regions respectively comprise SEQ ID NOs: 415-417; and the V_{L}CDR1, V_{L}CDR2, and V_{L}CDR3 regions respectively comprise SEQ ID NOs: 418-420;

[0331] the V_{H}CDR1, a V_{H}CDR2, and V_{H}CDR3 regions respectively comprise SEQ ID NOs: 421-423; and the V_{L}CDR1, V_{L}CDR2, and V_{L}CDR3 regions respectively comprise SEQ ID NOs: 424-426;

[0332] the V_{H}CDR1, a V_{H}CDR2, and V_{H}CDR3 regions respectively comprise SEQ ID NOs: 427-429; and the V_{L}CDR1, V_{L}CDR2, and V_{L}CDR3 regions respectively comprise SEQ ID NOs: 430-432;

[0333] the V_{H}CDR1, a V_{H}CDR2, and V_{H}CDR3 regions respectively comprise SEQ ID NOs: 433-435; and the V_{L}CDR1, V_{L}CDR2, and V_{L}CDR3 regions respectively comprise SEQ ID NOs: 436-438;

[0334] the V_{H}CDR1, a V_{H}CDR2, and V_{H}CDR3 regions respectively comprise SEQ ID NOs: 439-441; and the V_{L}CDR1, V_{L}CDR2, and V_{L}CDR3 regions respectively comprise SEQ ID NOs: 442-444;

[0335] the V_{H}CDR1, a V_{H}CDR2, and V_{H}CDR3 regions respectively comprise SEQ ID NOs: 445-447; and the V_{L}CDR1, V_{L}CDR2, and V_{L}CDR3 regions respectively comprise SEQ ID NOs: 448-450;

[0336] the V_{H}CDR1, a V_{H}CDR2, and V_{H}CDR3 regions respectively comprise SEQ ID NOs: 451-453; and the V_{L}CDR1, V_{L}CDR2, and V_{L}CDR3 regions respectively comprise SEQ ID NOs: 454-456;

[0337] the V_{H}CDR1, a V_{H}CDR2, and V_{H}CDR3 regions respectively comprise SEQ ID NOs: 457-459; and the V_{L}CDR1, V_{L}CDR2, and V_{L}CDR3 regions respectively comprise SEQ ID NOs: 460-462;

[0338] the V_{H}CDR1, a V_{H}CDR2, and V_{H}CDR3 regions respectively comprise SEQ ID NOs: 463-465; and the V_{L}CDR1, V_{L}CDR2, and V_{L}CDR3 regions respectively comprise SEQ ID NOs: 466-468;

[0339] the V_{H}CDR1, a V_{H}CDR2, and V_{H}CDR3 regions respectively comprise SEQ ID NOs: 469-471; and the V_{L}CDR1, V_{L}CDR2, and V_{L}CDR3 regions respectively comprise SEQ ID NOs: 472-474;

[0340] the V_{H}CDR1, a V_{H}CDR2, and V_{H}CDR3 regions respectively comprise SEQ ID NOs: 475-477; and the V_{L}CDR1, V_{L}CDR2, and V_{L}CDR3 regions respectively comprise SEQ ID NOs: 478-480;

[0341] the V_{H}CDR1, a V_{H}CDR2, and V_{H}CDR3 regions respectively comprise SEQ ID NOs: 481-483; and the V_{L}CDR1, V_{L}CDR2, and V_{L}CDR3 regions respectively comprise SEQ ID NOs: 484-486;

[0342] the V_{H}CDR1, a V_{H}CDR2, and V_{H}CDR3 regions respectively comprise SEQ ID NOs: 487-489; and the V_{L}CDR1, V_{L}CDR2, and V_{L}CDR3 regions respectively comprise SEQ ID NOs: 490-492;

[0343] the V_{H}CDR1, a V_{H}CDR2, and V_{H}CDR3 regions respectively comprise SEQ ID NOs: 493-495; and the V_{L}CDR1, V_{L}CDR2, and V_{L}CDR3 regions respectively comprise SEQ ID NOs: 496-498;

[0344] the V_{H}CDR1, a V_{H}CDR2, and V_{H}CDR3 regions respectively comprise SEQ ID NOs: 499-501; and the V_{L}CDR1, V_{L}CDR2, and V_{L}CDR3 regions respectively comprise SEQ ID NOs: 502-504;

[0345] the V_{H}CDR1, a V_{H}CDR2, and V_{H}CDR3 regions respectively comprise SEQ ID NOs: 505-507; and the V_{L}CDR1, V_{L}CDR2, and V_{L}CDR3 regions respectively comprise SEQ ID NOs: 508-510;

[0346] the V_{H}CDR1, a V_{H}CDR2, and V_{H}CDR3 regions respectively comprise SEQ ID NOs: 511-513; and the V_{L}CDR1, V_{L}CDR2, and V_{L}CDR3 regions respectively comprise SEQ ID NOs: 514-516;

[0347] the V_{H}CDR1, a V_{H}CDR2, and V_{H}CDR3 regions respectively comprise SEQ ID NOs: 517-519; and the V_{L}CDR1, V_{L}CDR2, and V_{L}CDR3 regions respectively comprise SEQ ID NOs: 520-522;

[0348] the V_{H}CDR1, a V_{H}CDR2, and V_{H}CDR3 regions respectively comprise SEQ ID NOs: 523-525; and the V_{L}CDR1, V_{L}CDR2, and V_{L}CDR3 regions respectively comprise SEQ ID NOs: 526-528;

[0349] the V_{H}CDR1, a V_{H}CDR2, and V_{H}CDR3 regions respectively comprise SEQ ID NOs: 529-531; and the V_{L}CDR1, V_{L}CDR2, and V_{L}CDR3 regions respectively comprise SEQ ID NOs: 532-534;

[0350] the V_{H}CDR1, a V_{H}CDR2, and V_{H}CDR3 regions respectively comprise SEQ ID NOs: 535-537; and the V_{L}CDR1, V_{L}CDR2, and V_{L}CDR3 regions respectively comprise SEQ ID NOs: 538-540;

[0351] the V_{H}CDR1, a V_{H}CDR2, and V_{H}CDR3 regions respectively comprise SEQ ID NOs: 541-543; and the V_{L}CDR1, V_{L}CDR2, and V_{L}CDR3 regions respectively comprise SEQ ID NOs: 544-546;

[0352] the V_{H}CDR1, a V_{H}CDR2, and V_{H}CDR3 regions respectively comprise SEQ ID NOs: 547-549; and the V_{L}CDR1, V_{L}CDR2, and V_{L}CDR3 regions respectively comprise SEQ ID NOs: 550-552;

[0353] the V_{H}CDR1, a V_{H}CDR2, and V_{H}CDR3 regions respectively comprise SEQ ID NOs: 553-555; and the V_{L}CDR1, V_{L}CDR2, and V_{L}CDR3 regions respectively comprise SEQ ID NOs: 556-558;

[0354] the V_{H}CDR1, a V_{H}CDR2, and V_{H}CDR3 regions respectively comprise SEQ ID NOs: 559-561; and the V_{L}CDR1, V_{L}CDR2, and V_{L}CDR3 regions respectively comprise SEQ ID NOs: 562-564;

[0355] the V_{H}CDR1, a V_{H}CDR2, and V_{H}CDR3 regions respectively comprise SEQ ID NOs: 565-567; and the V_{L}CDR1, V_{L}CDR2, and V_{L}CDR3 regions respectively comprise SEQ ID NOs: 568-570;

[0356] the V_{H}CDR1, a V_{H}CDR2, and V_{H}CDR3 regions respectively comprise SEQ ID NOs: 571-573; and the V_{L}CDR1, V_{L}CDR2, and V_{L}CDR3 regions respectively comprise SEQ ID NOs: 574-576;

[0357] the V_{H}CDR1, a V_{H}CDR2, and V_{H}CDR3 regions respectively comprise SEQ ID NOs: 577-579; and the V_{L}CDR1, V_{L}CDR2, and V_{L}CDR3 regions respectively comprise SEQ ID NOs: 580-582;

[0358] the V_{H}CDR1, a V_{H}CDR2, and V_{H}CDR3 regions respectively comprise SEQ ID NOs: 583-585; and the V_{L}CDR1, V_{L}CDR2, and V_{L}CDR3 regions respectively comprise SEQ ID NOs: 586-588;

[0359] the V_{H}CDR1, a V_{H}CDR2, and V_{H}CDR3 regions respectively comprise SEQ ID NOs: 589-591; and the V_{L}CDR1, V_{L}CDR2, and V_{L}CDR3 regions respectively comprise SEQ ID NOs: 592-594;

[0360] the V_{H}CDR1, a V_{H}CDR2, and V_{H}CDR3 regions respectively comprise SEQ ID NOs: 595-597; and the V_{L}CDR1, V_{L}CDR2, and V_{L}CDR3 regions respectively comprise SEQ ID NOs: 598-600;

[0361] the V_{H}CDR1, a V_{H}CDR2, and V_{H}CDR3 regions respectively comprise SEQ ID NOs: 601-603; and the V_{L}CDR1, V_{L}CDR2, and V_{L}CDR3 regions respectively comprise SEQ ID NOs: 604-606;

[0362] the V_{H}CDR1, a V_{H}CDR2, and V_{H}CDR3 regions respectively comprise SEQ ID NOs: 607-609; and the V_{L}CDR1, V_{L}CDR2, and V_{L}CDR3 regions respectively comprise SEQ ID NOs: 610-612;

[0363] the V_{H}CDR1, a V_{H}CDR2, and V_{H}CDR3 regions respectively comprise SEQ ID NOs: 613-615; and the V_{L}CDR1, V_{L}CDR2, and V_{L}CDR3 regions respectively comprise SEQ ID NOs: 616-618;

[0364] the V_{H}CDR1, a V_{H}CDR2, and V_{H}CDR3 regions respectively comprise SEQ ID NOs: 619-621; and the V_{L}CDR1, V_{L}CDR2, and V_{L}CDR3 regions respectively comprise SEQ ID NOs: 622-624;

[0365] the V_{H}CDR1, a V_{H}CDR2, and V_{H}CDR3 regions respectively comprise SEQ ID NOs: 625-627; and the V_{L}CDR1, V_{L}CDR2, and V_{L}CDR3 regions respectively comprise SEQ ID NOs: 628-630;

[0366] the V_{H}CDR1, a V_{H}CDR2, and V_{H}CDR3 regions respectively comprise SEQ ID NOs: 631-633; and the V_{L}CDR1, V_{L}CDR2, and V_{L}CDR3 regions respectively comprise SEQ ID NOs: 634-636;

[0367] the V_{H}CDR1, a V_{H}CDR2, and V_{H}CDR3 regions respectively comprise SEQ ID NOs: 637-639; and the V_{L}CDR1, V_{L}CDR2, and V_{L}CDR3 regions respectively comprise SEQ ID NOs: 640-642;

[0368] the V_{H}CDR1, a V_{H}CDR2, and V_{H}CDR3 regions respectively comprise SEQ ID NOs: 643-645; and the V_{L}CDR1, V_{L}CDR2, and V_{L}CDR3 regions respectively comprise SEQ ID NOs: 646-648;

[0369] the V_{H}CDR1, a V_{H}CDR2, and V_{H}CDR3 regions respectively comprise SEQ ID NOs: 649-651; and the V_{L}CDR1, V_{L}CDR2, and V_{L}CDR3 regions respectively comprise SEQ ID NOs: 652-654;

[0370] the V_{H}CDR1, a V_{H}CDR2, and V_{H}CDR3 regions respectively comprise SEQ ID NOs: 655-657; and the V_{L}CDR1, V_{L}CDR2, and V_{L}CDR3 regions respectively comprise SEQ ID NOs: 658-660;

[0371] the V_{H}CDR1, a V_{H}CDR2, and V_{H}CDR3 regions respectively comprise SEQ ID NOs: 661-663; and the V_{L}CDR1, V_{L}CDR2, and V_{L}CDR3 regions respectively comprise SEQ ID NOs: 664-666;

[0372] the V_{H}CDR1, a V_{H}CDR2, and V_{H}CDR3 regions respectively comprise SEQ ID NOs: 667-669; and the V_{L}CDR1, V_{L}CDR2, and V_{L}CDR3 regions respectively comprise SEQ ID NOs: 670-672;

[0373] the V_{H}CDR1, a V_{H}CDR2, and V_{H}CDR3 regions respectively comprise SEQ ID NOs: 673-675; and the V_{L}CDR1, V_{L}CDR2, and V_{L}CDR3 regions respectively comprise SEQ ID NOs: 676-678;

[0374] the V_{H}CDR1, a V_{H}CDR2, and V_{H}CDR3 regions respectively comprise SEQ ID NOs: 679-681; and the V_{L}CDR1, V_{L}CDR2, and V_{L}CDR3 regions respectively comprise SEQ ID NOs: 682-684;

[0375] the V_{H}CDR1, a V_{H}CDR2, and V_{H}CDR3 regions respectively comprise SEQ ID NOs: 685-687; and the V_{L}CDR1, V_{L}CDR2, and V_{L}CDR3 regions respectively comprise SEQ ID NOs: 688-690;

[0376] the V_{H}CDR1, a V_{H}CDR2, and V_{H}CDR3 regions respectively comprise SEQ ID NOs: 691-693; and the V_{L}CDR1, V_{L}CDR2, and V_{L}CDR3 regions respectively comprise SEQ ID NOs: 694-696;

[0377] the V_{H}CDR1, a V_{H}CDR2, and V_{H}CDR3 regions respectively comprise SEQ ID NOs: 697-699; and the V_{L}CDR1, V_{L}CDR2, and V_{L}CDR3 regions respectively comprise SEQ ID NOs: 700-702;

[0378] the V_{H}CDR1, a V_{H}CDR2, and V_{H}CDR3 regions respectively comprise SEQ ID NOs: 703-705; and the V_{L}CDR1, V_{L}CDR2, and V_{L}CDR3 regions respectively comprise SEQ ID NOs: 706-708;

[0379] the V_{H}CDR1, a V_{H}CDR2, and V_{H}CDR3 regions respectively comprise SEQ ID NOs: 709-711; and the V_{L}CDR1, V_{L}CDR2, and V_{L}CDR3 regions respectively comprise SEQ ID NOs: 712-714;

[0380] the V_{H}CDR1, a V_{H}CDR2, and V_{H}CDR3 regions respectively comprise SEQ ID NOs: 715-717; and the V_{L}CDR1, V_{L}CDR2, and V_{L}CDR3 regions respectively comprise SEQ ID NOs: 718-720;

[0381] the V_{H}CDR1, a V_{H}CDR2, and V_{H}CDR3 regions respectively comprise SEQ ID NOs: 721-723; and the V_{L}CDR1, V_{L}CDR2, and V_{L}CDR3 regions respectively comprise SEQ ID NOs: 724-726;

[0382] the V_{H}CDR1, a V_{H}CDR2, and V_{H}CDR3 regions respectively comprise SEQ ID NOs: 727-729; and the V_{L}CDR1, V_{L}CDR2, and V_{L}CDR3 regions respectively comprise SEQ ID NOs: 730-732;

[0383] the V_{H}CDR1, a V_{H}CDR2, and V_{H}CDR3 regions respectively comprise SEQ ID NOs: 733-735; and the V_{L}CDR1, V_{L}CDR2, and V_{L}CDR3 regions respectively comprise SEQ ID NOs: 736-738;

[0384] the V_{H}CDR1, a V_{H}CDR2, and V_{H}CDR3 regions respectively comprise SEQ ID NOs: 739-741; and the V_{L}CDR1, V_{L}CDR2, and V_{L}CDR3 regions respectively comprise SEQ ID NOs: 742-744; or

[0385] the V_{H}CDR1, a V_{H}CDR2, and V_{H}CDR3 regions respectively comprise SEQ ID NOs: 745-747; and the V_{L}CDR1, V_{L}CDR2, and V_{L}CDR3 regions respectively comprise SEQ ID NOs: 748-750.

[0386] Also included are variants thereof, including affinity matured variants, which bind to FAP and optionally B7H3 at the same or substantially the same paratope, for example, variants having 1, 2, 3, 4, 5, 6, 7, or 8 total alterations across the CDR regions, for example, one or more the V_{H}CDR1, V_{H}CDR2, V_{H}CDR3, V_{L}CDR1, V_{L}CDR2, and/or V_{L}CDR3 sequences described herein. Exemplary “alterations” include amino acid substitutions, additions, and deletions.

[0387] In certain embodiments, an antibody, or antigen-binding fragment thereof, is characterized by or comprises a heavy chain (V_{H} region, Fc region) and a light chain (or V_{L} region). Exemplary sequences of heavy chain and light chains are provided in Table A2 below (V_{H}CDR1, V_{H}CDR2, V_{H}CDR3, V_{L}CDR1, V_{L}CDR2, and V_{L}CDR3 regions are in bold).

TABLE
Exemplary Heavy and Light Chain Sequences

| | | |
|---|---|---|
| | | SEQ |
| | | ID |
| Name | Sequence | NO: |

P14471450

| | | |
|---|---|---|
| Heavy | EVQLVQSGAEVKKPGESLKISCKGSGYTFTENIIHWVRQMPGKGLEWIGWFH | 751 |
| Chain | PGSGSIKYNEKFKDQVTISADKSISTAYLQWSSLKASDTAMYFCARHGGTGR | |
| | GAMDYWGQGTLVTVSSASTKGPSVFPLAPSSKSTSGGTAALGCLVKDYFPEP | |
| | VTVSWNSGALTSGVHTFPAVLQSSGLYSLSSVVTVPSSSLGTQTYICNVNHK | |
| | PSNTKVDKKVEPKSCDKTHTCPPCPAPELLGGPSVFLFPPKPKDTLMISRTP | |
| | EVTCVVVDVSHEDPEVKFNWYVDGVEVHNAKTKPREEQYNSTYRVVSVLTVL | |
| | HQDWLNGKEYKCKVSNKALPAPIEKTISKAKGQPREPQVYTLPPSRDELTKN | |
| | QVSLTCLVKGFYPSDIAVEWESNGQPENNYKTTPPVLDSDGSFFLYSKLTVD | |
| | KSRWQQGNVFSCSVMHEALHNHYTQKSLSLSPGK | |
| Light | DIVMTQTPLSLSVTPGQPASISCRASKSVSTSAYSYMHWYLQKPGQSPQLLI | 752 |
| Chain | YLASNLESGVPDRFSGSGSGTDFTLKISRVEAEDVGVYYCQHSRELPYTFGQ | |
| | GTKLEIKRTVAAPSVFIFPPSDEQLKSGTASVVCLLNNFYPREAKVQWKVDN | |
| | ALQSGNSQESVTEQDSKDSTYSLSSTLTLSKADYEKHKVYACEVTHQGLSSP | |
| | VTKSFNRGEC | |

P14481450

| | | |
|---|---|---|
| Heavy | EVQLVQSGAEVKKPGESLKISCKGSGYTFTENIIHWVRQMPGKGLEWIGWFH | 753 |
| Chain | PGSGSIKYNEKFKDQVTISADKSISTAYLQWSSLKASDTAMYFCARHGGTGR | |
| | GAMDYWGQGTLVTVSSASTKGPSVFPLAPSSKSTSGGTAALGCLVKDYFPEP | |
| | VTVSWNSGALTSGVHTFPAVLQSSGLYSLSSVVTVPSSSLGTQTYICNVNHK | |
| | PSNTKVDKKVEPKSCDKTHTCPPCPAPEAAGGPSVFLFPPKPKDTLMISRTP | |
| | EVTCVVVDVSHEDPEVKFNWYVDGVEVHNAKTKPREEQYNSTYRVVSVLTVL | |
| | HQDWLNGKEYKCKVSNKALAAPIEKTISKAKGQPREPQVYTLPPSRDELTKN | |
| | QVSLTCLVKGFYPSDIAVEWESNGQPENNYKTTPPVLDSDGSFFLYSKLTVD | |
| | KSRWQQGNVFSCSVMHEALHNHYTQKSLSLSPGK | |
| Light | DIVMTQTPLSLSVTPGQPASISCRASKSVSTSAYSYMHWYLQKPGQSPQLLI | 754 |
| Chain | YLASNLESGVPDRFSGSGSGTDFTLKISRVEAEDVGVYYCQHSRELPYTFGQ | |
| | GTKLEIKRTVAAPSVFIFPPSDEQLKSGTASVVCLLNNFYPREAKVQWKVDN | |
| | ALQSGNSQESVTEQDSKDSTYSLSSTLTLSKADYEKHKVYACEVTHQGLSSP | |
| | VTKSFNRGEC | |

P14482156

| | | |
|---|---|---|
| Heavy | EVQLVQSGAEVKKPGESLKISCKGSGYTFTENIIHWVRQMPGKGLEWIGWFH | 755 |
| Chain | PGSGSIKYNEKFKDQVTISADKSISTAYLQWSSLKASDTAMYFCARHGGTGR | |
| | GAMDYWGQGTLVTVSSASTKGPSVFPLAPSSKSTSGGTAALGCLVKDYFPEP | |
| | VTVSWNSGALTSGVHTFPAVLQSSGLYSLSSVVTVPSSSLGTQTYICNVNHK | |
| | PSNTKVDKKVEPKSCDKTHTCPPCPAPEAAGGPSVFLFPPKPKDTLMISRTP | |
| | EVTCVVVDVSHEDPEVKFNWYVDGVEVHNAKTKPREEQYNSTYRVVSVLTVL | |
| | HQDWLNGKEYKCKVSNKALAAPIEKTISKAKGQPREPQVYTLPPSRDELTKN | |
| | QVSLTCLVKGFYPSDIAVEWESNGQPENNYKTTPPVLDSDGSFFLYSKLTVD | |
| | KSRWQQGNVFSCSVMHEALHNHYTQKSLSLSPGK | |
| Light | DIVMTQTPLSLSVTPGQPASISCRASKSVSTSAYSYMHWYLQKPGQSPQLLI | 756 |
| Chain | YLASNRESGVPDRFSGSGSGTDFTLKISRVEAEDVGVYYCMQSRELPYTFGQ | |
| | GTKLEIKRTVAAPSVFIFPPSDEQLKSGTASVVCLLNNFYPREAKVQWKVDN | |
| | ALQSGNSQESVTEQDSKDSTYSLSSTLTLSKADYEKHKVYACEVTHQGLSSP | |
| | VTKSFNRGEC | |

P14482157

| | | |
|---|---|---|
| Heavy | EVQLVQSGAEVKKPGESLKISCKGSGYTFTENIIHWVRQMPGKGLEWIGWFH | 757 |
| Chain | PGSGSIKYNEKFKDQVTISADKSISTAYLQWSSLKASDTAMYFCARHGGTGR | |
| | GAMDYWGQGTLVTVSSASTKGPSVFPLAPSSKSTSGGTAALGCLVKDYFPEP | |
| | VTVSWNSGALTSGVHTFPAVLQSSGLYSLSSVVTVPSSSLGTQTYICNVNHK | |
| | PSNTKVDKKVEPKSCDKTHTCPPCPAPEAAGGPSVFLFPPKPKDTLMISRTP | |
| | EVTCVVVDVSHEDPEVKFNWYVDGVEVHNAKTKPREEQYNSTYRVVSVLTVL | |
| | HQDWLNGKEYKCKVSNKALAAPIEKTISKAKGQPREPQVYTLPPSRDELTKN | |
| | QVSLTCLVKGFYPSDIAVEWESNGQPENNYKTTPPVLDSDGSFFLYSKLTVD | |
| | KSRWQQGNVFSCSVMHEALHNHYTQKSLSLSPGK | |
| Light | DIQMTQSPSSLSASVGDRVTITCRASQSISTSAYSYMHWYQQKPGKAPKLLI | 758 |
| Chain | YLASNLESGVPSRFSGSGSGTDFTLTISSLQPEDFATYYCQQSRELPYTFGQ | |
| | GTKLEIKRTVAAPSVFIFPPSDEQLKSGTASVVCLLNNFYPREAKVQWKVDN | |
| | ALQSGNSQESVTEQDSKDSTYSLSSTLTLSKADYEKHKVYACEVTHQGLSSP | |
| | VTKSFNRGEC | |

P21531450

| | | |
|---|---|---|
| Heavy | EVQLVQSGAEVKKPGESLKISCKGSGYTFTENIIHWVRQMPGKGLEWIGIIH | 759 |
| Chain | PGSGSIKYSPSFQGQVTISADKSISTAYLQWSSLKASDTAMYFCARHGGTGR | |
| | GAMDYWGQGTLVTVSSASTKGPSVFPLAPSSKSTSGGTAALGCLVKDYFPEP | |
| | VTVSWNSGALTSGVHTFPAVLQSSGLYSLSSVVTVPSSSLGTQTYICNVNHK | |
| | PSNTKVDKKVEPKSCDKTHTCPPCPAPEAAGGPSVFLFPPKPKDTLMISRTP | |
| | EVTCVVVDVSHEDPEVKFNWYVDGVEVHNAKTKPREEQYNSTYRVVSVLTVL | |
| | HQDWLNGKEYKCKVSNKALAAPIEKTISKAKGQPREPQVYTLPPSRDELTKN | |
| | QVSLTCLVKGFYPSDIAVEWESNGQPENNYKTTPPVLDSDGSFFLYSKLTVD | |
| | KSRWQQGNVFSCSVMHEALHNHYTQKSLSLSPGK | |
| Light | DIVMTQTPLSLSVTPGQPASISCRASKSVSTSAYSYMHWYLQKPGQSPQLLI | 760 |
| Chain | YLASNLESGVPDRFSGSGSGTDFTLKISRVEAEDVGVYYCQHSRELPYTFGQ | |
| | GTKLEIKRTVAAPSVFIFPPSDEQLKSGTASVVCLLNNFYPREAKVQWKVDN | |
| | ALQSGNSQESVTEQDSKDSTYSLSSTLTLSKADYEKHKVYACEVTHQGLSSP | |
| | VTKSFNRGEC | |

P21532156

| | | |
|---|---|---|
| Heavy | EVQLVQSGAEVKKPGESLKISCKGSGYTFTENIIHWVRQMPGKGLEWIGIIH | 761 |
| Chain | PGSGSIKYSPSFQGQVTISADKSISTAYLQWSSLKASDTAMYFCARHGGTGR | |
| | GAMDYWGQGTLVTVSSASTKGPSVFPLAPSSKSTSGGTAALGCLVKDYFPEP | |
| | VTVSWNSGALTSGVHTFPAVLQSSGLYSLSSVVTVPSSSLGTQTYICNVNHK | |
| | PSNTKVDKKVEPKSCDKTHTCPPCPAPEAAGGPSVFLFPPKPKDTLMISRTP | |
| | EVTCVVVDVSHEDPEVKFNWYVDGVEVHNAKTKPREEQYNSTYRVVSVLTVL | |
| | HQDWLNGKEYKCKVSNKALAAPIEKTISKAKGQPREPQVYTLPPSRDELTKN | |
| | QVSLTCLVKGFYPSDIAVEWESNGQPENNYKTTPPVLDSDGSFFLYSKLTVD | |
| | KSRWQQGNVFSCSVMHEALHNHYTQKSLSLSPGK | |
| Light | DIVMTQTPLSLSVTPGQPASISCRASKSVSTSAYSYMHWYLQKPGQSPQLLI | 762 |
| Chain | YLASNRESGVPDRFSGSGSGTDFTLKISRVEAEDVGVYYCMQSRELPYTFGQ | |
| | GTKLEIKRTVAAPSVFIFPPSDEQLKSGTASVVCLLNNFYPREAKVQWKVDN | |
| | ALQSGNSQESVTEQDSKDSTYSLSSTLTLSKADYEKHKVYACEVTHQGLSSP | |
| | VTKSFNRGEC | |

P21532157

| | | |
|---|---|---|
| Heavy | EVQLVQSGAEVKKPGESLKISCKGSGYTFTENIIHWVRQMPGKGLEWIGIIH | 763 |
| Chain | PGSGSIKYSPSFQGQVTISADKSISTAYLQWSSLKASDTAMYFCARHGGTGR | |
| | GAMDYWGQGTLVTVSSASTKGPSVFPLAPSSKSTSGGTAALGCLVKDYFPEP | |
| | VTVSWNSGALTSGVHTFPAVLQSSGLYSLSSVVTVPSSSLGTQTYICNVNHK | |
| | PSNTKVDKKVEPKSCDKTHTCPPCPAPEAAGGPSVFLFPPKPKDTLMISRTP | |
| | EVTCVVVDVSHEDPEVKFNWYVDGVEVHNAKTKPREEQYNSTYRVVSVLTVL | |
| | HQDWLNGKEYKCKVSNKALAAPIEKTISKAKGQPREPQVYTLPPSRDELTKN | |
| | QVSLTCLVKGFYPSDIAVEWESNGQPENNYKTTPPVLDSDGSFFLYSKLTVD | |
| | KSRWQQGNVFSCSVMHEALHNHYTQKSLSLSPGK | |
| Light | DIQMTQSPSSLSASVGDRVTITCRASQSISTSAYSYMHWYQQKPGKAPKLLI | 764 |
| Chain | YLASNLESGVPSRFSGSGSGTDFTLTISSLQPEDFATYYCQQSRELPYTFGQ | |
| | GTKLEIKRTVAAPSVFIFPPSDEQLKSGTASVVCLLNNFYPREAKVQWKVDN | |
| | ALQSGNSQESVTEQDSKDSTYSLSSTLTLSKADYEKHKVYACEVTHQGLSSP | |
| | VTKSFNRGEC | |

P21542158

| | | |
|---|---|---|
| Heavy | QVQLVQSGAEVKKPGASVKVSCKASGYTFTENIIHWVRQAPGQGLEWMGWIH | 765 |
| Chain | PGSGSIKYAQKLQGRVTMTTDTSTSTAYMELRSLRSDDTAVYYCARHGGTGR | |
| | GAMDYWGQGTLVTVSSASTKGPSVFPLAPSSKSTSGGTAALGCLVKDYFPEP | |
| | VTVSWNSGALTSGVHTFPAVLQSSGLYSLSSVVTVPSSSLGTQTYICNVNHK | |
| | PSNTKVDKKVEPKSCDKTHTCPPCPAPEAAGGPSVFLFPPKPKDTLMISRTP | |
| | EVTCVVVDVSHEDPEVKFNWYVDGVEVHNAKTKPREEQYNSTYRVVSVLTVL | |
| | HQDWLNGKEYKCKVSNKALAAPIEKTISKAKGQPREPQVYTLPPSRDELTKN | |
| | QVSLTCLVKGFYPSDIAVEWESNGQPENNYKTTPPVLDSDGSFFLYSKLTVD | |
| | KSRWQQGNVFSCSVMHEALHNHYTQKSLSLSPGK | |
| Light | EIVLTQSPGTLSLSPGERATLSCRASQSVSTSAYSYMHWYQQKPGQAPRLLI | 766 |
| Chain | YLASNLESGIPDRFSGSGSGTDFTLTISRLEPEDFAVYYCQQSRELPYTFGQ | |
| | GTKLEIKRTVAAPSVFIFPPSDEQLKSGTASVVCLLNNFYPREAKVQWKVDN | |
| | ALQSGNSQESVTEQDSKDSTYSLSSTLTLSKADYEKHKVYACEVTHQGLSSP | |
| | VTKSFNRGEC | |

P21542159

| | | |
|---|---|---|
| Heavy | QVQLVQSGAEVKKPGASVKVSCKASGYTFTENIIHWVRQAPGQGLEWMGWIH | 767 |
| Chain | PGSGSIKYAQKLQGRVTMTTDTSTSTAYMELRSLRSDDTAVYYCARHGGTGR | |
| | GAMDYWGQGTLVTVSSASTKGPSVFPLAPSSKSTSGGTAALGCLVKDYFPEP | |
| | VTVSWNSGALTSGVHTFPAVLQSSGLYSLSSVVTVPSSSLGTQTYICNVNHK | |
| | PSNTKVDKKVEPKSCDKTHTCPPCPAPEAAGGPSVFLFPPKPKDTLMISRTP | |
| | EVTCVVVDVSHEDPEVKFNWYVDGVEVHNAKTKPREEQYNSTYRVVSVLTVL | |
| | HQDWLNGKEYKCKVSNKALAAPIEKTISKAKGQPREPQVYTLPPSRDELTKN | |
| | QVSLTCLVKGFYPSDIAVEWESNGQPENNYKTTPPVLDSDGSFFLYSKLTVD | |
| | KSRWQQGNVFSCSVMHEALHNHYTQKSLSLSPGK | |
| Light | EIVLTQSPGTLSLSPGERATLSCRASQSVSTSAYSYMHWYQQKPGQAPRLLI | 768 |
| Chain | YLASNRETGIPDRFSGSGSGTDFTLTISRLEPEDFAVYYCQQSRELPYTFGQ | |
| | GTKLEIKRTVAAPSVFIFPPSDEQLKSGTASVVCLLNNFYPREAKVQWKVDN | |
| | ALQSGNSQESVTEQDSKDSTYSLSSTLTLSKADYEKHKVYACEVTHQGLSSP | |
| | VTKSFNRGEC | |

P21552157

| | | |
|---|---|---|
| Heavy | EVQLLESGGGLVQPGGSLRLSCAASGFTFSENIIHWVRQAPGKGLEWVSAIH | 769 |
| Chain | PGSGSIKYADSVKGRFTISRDNSKNTLYLQMNSLRAEDTAVYYCAKHGGTGR | |
| | GAMDYWGQGTLVTVSSASTKGPSVFPLAPSSKSTSGGTAALGCLVKDYFPEP | |
| | VTVSWNSGALTSGVHTFPAVLQSSGLYSLSSVVTVPSSSLGTQTYICNVNHK | |
| | PSNTKVDKKVEPKSCDKTHTCPPCPAPEAAGGPSVFLFPPKPKDTLMISRTP | |
| | EVTCVVVDVSHEDPEVKFNWYVDGVEVHNAKTKPREEQYNSTYRVVSVLTVL | |
| | HQDWLNGKEYKCKVSNKALAAPIEKTISKAKGQPREPQVYTLPPSRDELTKN | |
| | QVSLTCLVKGFYPSDIAVEWESNGQPENNYKTTPPVLDSDGSFFLYSKLTVD | |
| | KSRWQQGNVFSCSVMHEALHNHYTQKSLSLSPGK | |
| Light | DIQMTQSPSSLSASVGDRVTITCRASQSISTSAYSYMHWYQQKPGKAPKLLI | 770 |
| Chain | YLASNLESGVPSRFSGSGSGTDFTLTISSLQPEDFATYYCQQSRELPYTFGQ | |
| | GTKLEIKRTVAAPSVFIFPPSDEQLKSGTASVVCLLNNFYPREAKVQWKVDN | |
| | ALQSGNSQESVTEQDSKDSTYSLSSTLTLSKADYEKHKVYACEVTHQGLSSP | |
| | VTKSFNRGEC | |

P21552160

| | | |
|---|---|---|
| Heavy | EVQLLESGGGLVQPGGSLRLSCAASGFTFSENIIHWVRQAPGKGLEWVSAIH | 771 |
| Chain | PGSGSIKYADSVKGRFTISRDNSKNTLYLQMNSLRAEDTAVYYCAKHGGTGR | |
| | GAMDYWGQGTLVTVSSASTKGPSVFPLAPSSKSTSGGTAALGCLVKDYFPEP | |
| | VTVSWNSGALTSGVHTFPAVLQSSGLYSLSSVVTVPSSSLGTQTYICNVNHK | |
| | PSNTKVDKKVEPKSCDKTHTCPPCPAPEAAGGPSVFLFPPKPKDTLMISRTP | |
| | EVTCVVVDVSHEDPEVKFNWYVDGVEVHNAKTKPREEQYNSTYRVVSVLTVL | |
| | HQDWLNGKEYKCKVSNKALAAPIEKTISKAKGQPREPQVYTLPPSRDELTKN | |
| | QVSLTCLVKGFYPSDIAVEWESNGQPENNYKTTPPVLDSDGSFFLYSKLTVD | |
| | KSRWQQGNVFSCSVMHEALHNHYTQKSLSLSPGK | |
| Light | EIVMTQSPATLSVSPGERATLSCRASQSVSTSAYSYMHWYQQKPGQAPRLLI | 772 |
| Chain | YLASNLESGIPARFSGSGSGTEFTLTISSLQSEDFAVYYCQQSRELPYTFGQ | |
| | GTKLEIKRTVAAPSVFIFPPSDEQLKSGTASVVCLLNNFYPREAKVQWKVDN | |
| | ALQSGNSQESVTEQDSKDSTYSLSSTLTLSKADYEKHKVYACEVTHQGLSSP | |
| | VTKSFNRGEC | |

P21552161

| | | |
|---|---|---|
| Heavy | EVQLLESGGGLVQPGGSLRLSCAASGFTFSENIIHWVRQAPGKGLEWVSAIH | 773 |
| Chain | PGSGSIKYADSVKGRFTISRDNSKNTLYLQMNSLRAEDTAVYYCAKHGGTGR | |
| | GAMDYWGQGTLVTVSSASTKGPSVFPLAPSSKSTSGGTAALGCLVKDYFPEP | |
| | VTVSWNSGALTSGVHTFPAVLQSSGLYSLSSVVTVPSSSLGTQTYICNVNHK | |
| | PSNTKVDKKVEPKSCDKTHTCPPCPAPEAAGGPSVFLFPPKPKDTLMISRTP | |
| | EVTCVVVDVSHEDPEVKFNWYVDGVEVHNAKTKPREEQYNSTYRVVSVLTVL | |
| | HQDWLNGKEYKCKVSNKALAAPIEKTISKAKGQPREPQVYTLPPSRDELTKN | |
| | QVSLTCLVKGFYPSDIAVEWESNGQPENNYKTTPPVLDSDGSFFLYSKLTVD | |
| | KSRWQQGNVFSCSVMHEALHNHYTQKSLSLSPGK | |
| Light | EIVMTQSPATLSVSPGERATLSCRASQSVSTSAYSYMHWYQQKPGQAPRLLI | 774 |
| Chain | YLASNRETGIPARFSGSGSGTEFTLTISSLQSEDFAVYYCQQSRELPYTFGQ | |
| | GTKLEIKRTVAAPSVFIFPPSDEQLKSGTASVVCLLNNFYPREAKVQWKVDN | |
| | ALQSGNSQESVTEQDSKDSTYSLSSTLTLSKADYEKHKVYACEVTHQGLSSP | |
| | VTKSFNRGEC | |

P24492158

| | | |
|---|---|---|
| Heavy | QVQLVQSGAEVKKPGASVKVSCKASGYTFTENIIHWVRQAPGQGLEWMGWIH | 775 |
| Chain | PGSGSIKYAQKLQGRVTMTTDTSTSTAYMELRSLRSDDTAVYYCARHGGTGR | |
| | GAMDYWGQGTLVTVSSASTKGPSVFPLAPSSKSTSGGTAALGCLVKDYFPEP | |
| | VTVSWNSGALTSGVHTFPAVLQSSGLYSLSSVVTVPSSSLGTQTYICNVNHK | |
| | PSNTKVDKKVEPKSCDKTHTCPPCPAPELLGGPSVFLFPPKPKDTLMISRTP | |
| | EVTCVVVDVSHEDPEVKFNWYVDGVEVHNAKTKPREEQYNSTYRVVSVLTVL | |
| | HQDWLNGKEYKCKVSNKALPAPIEKTISKAKGQPREPQVYTLPPSRDELTKN | |
| | QVSLTCLVKGFYPSDIAVEWESNGQPENNYKTTPPVLDSDGSFFLYSKLTVD | |
| | KSRWQQGNVFSCSVMHEALHNHYTQKSLSLSPGK | |
| Light | EIVLTQSPGTLSLSPGERATLSCRASQSVSTSAYSYMHWYQQKPGQAPRLLI | 776 |
| Chain | YLASNLESGIPDRFSGSGSGTDFTLTISRLEPEDFAVYYCQQSRELPYTFGQ | |
| | GTKLEIKRTVAAPSVFIFPPSDEQLKSGTASVVCLLNNFYPREAKVQWKVDN | |
| | ALQSGNSQESVTEQDSKDSTYSLSSTLTLSKADYEKHKVYACEVTHQGLSSP | |
| | VTKSFNRGEC | |

P24492470

| | | |
|---|---|---|
| Heavy | QVQLVQSGAEVKKPGASVKVSCKASGYTFTENIIHWVRQAPGQGLEWMGWIH | 777 |
| Chain | PGSGSIKYAQKLQGRVTMTTDTSTSTAYMELRSLRSDDTAVYYCARHGGTGR | |
| | GAMDYWGQGTLVTVSSASTKGPSVFPLAPSSKSTSGGTAALGCLVKDYFPEP | |
| | VTVSWNSGALTSGVHTFPAVLQSSGLYSLSSVVTVPSSSLGTQTYICNVNHK | |
| | PSNTKVDKKVEPKSCDKTHTCPPCPAPELLGGPSVFLFPPKPKDTLMISRTP | |
| | EVTCVVVDVSHEDPEVKFNWYVDGVEVHNAKTKPREEQYNSTYRVVSVLTVL | |
| | HQDWLNGKEYKCKVSNKALPAPIEKTISKAKGQPREPQVYTLPPSRDELTKN | |
| | QVSLTCLVKGFYPSDIAVEWESNGQPENNYKTTPPVLDSDGSFFLYSKLTVD | |
| | KSRWQQGNVFSCSVMHEALHNHYTQKSLSLSPGK | |
| Light | EIVLTQSPGTLSLSPGERATLSCRASQSVSASAYSYMHWYQQKPGQAPRLLI | 778 |
| Chain | YLASNLESGIPDRFSGSGSGTDFTLTISRLEPEDFAVYYCQQSRELPYTFGQ | |
| | GTKLEIKRTVAAPSVFIFPPSDEQLKSGTASVVCLLNNFYPREAKVQWKVDN | |
| | ALQSGNSQESVTEQDSKDSTYSLSSTLTLSKADYEKHKVYACEVTHQGLSSP | |
| | VTKSFNRGEC | |

P24492471

| | | |
|---|---|---|
| Heavy | QVQLVQSGAEVKKPGASVKVSCKASGYTFTENIIHWVRQAPGQGLEWMGWIH | 779 |
| Chain | PGSGSIKYAQKLQGRVTMTTDTSTSTAYMELRSLRSDDTAVYYCARHGGTGR | |
| | GAMDYWGQGTLVTVSSASTKGPSVFPLAPSSKSTSGGTAALGCLVKDYFPEP | |
| | VTVSWNSGALTSGVHTFPAVLQSSGLYSLSSVVTVPSSSLGTQTYICNVNHK | |
| | PSNTKVDKKVEPKSCDKTHTCPPCPAPELLGGPSVFLFPPKPKDTLMISRTP | |
| | EVTCVVVDVSHEDPEVKFNWYVDGVEVHNAKTKPREEQYNSTYRVVSVLTVL | |
| | HQDWLNGKEYKCKVSNKALPAPIEKTISKAKGQPREPQVYTLPPSRDELTKN | |
| | QVSLTCLVKGFYPSDIAVEWESNGQPENNYKTTPPVLDSDGSFFLYSKLTVD | |
| | KSRWQQGNVFSCSVMHEALHNHYTQKSLSLSPGK | |
| Light | EIVLTQSPGTLSLSPGERATLSCRASQSVSTAAYSYMHWYQQKPGQAPRLLI | 780 |
| Chain | YLASNLESGIPDRFSGSGSGTDFTLTISRLEPEDFAVYYCQQSRELPYTFGQ | |
| | GTKLEIKRTVAAPSVFIFPPSDEQLKSGTASVVCLLNNFYPREAKVQWKVDN | |
| | ALQSGNSQESVTEQDSKDSTYSLSSTLTLSKADYEKHKVYACEVTHQGLSSP | |
| | VTKSFNRGEC | |

P24492472

| | | |
|---|---|---|
| Heavy | QVQLVQSGAEVKKPGASVKVSCKASGYTFTENIIHWVRQAPGQGLEWMGWIH | 781 |
| Chain | PGSGSIKYAQKLQGRVTMTTDTSTSTAYMELRSLRSDDTAVYYCARHGGTGR | |
| | GAMDYWGQGTLVTVSSASTKGPSVFPLAPSSKSTSGGTAALGCLVKDYFPEP | |
| | VTVSWNSGALTSGVHTFPAVLQSSGLYSLSSVVTVPSSSLGTQTYICNVNHK | |
| | PSNTKVDKKVEPKSCDKTHTCPPCPAPELLGGPSVFLFPPKPKDTLMISRTP | |
| | EVTCVVVDVSHEDPEVKFNWYVDGVEVHNAKTKPREEQYNSTYRVVSVLTVL | |
| | HQDWLNGKEYKCKVSNKALPAPIEKTISKAKGQPREPQVYTLPPSRDELTKN | |
| | QVSLTCLVKGFYPSDIAVEWESNGQPENNYKTTPPVLDSDGSFFLYSKLTVD | |
| | KSRWQQGNVFSCSVMHEALHNHYTQKSLSLSPGK | |
| Light | EIVLTQSPGTLSLSPGERATLSCRASQSVSTSAASYMHWYQQKPGQAPRLLI | 782 |
| Chain | YLASNLESGIPDRFSGSGSGTDFTLTISRLEPEDFAVYYCQQSRELPYTFGQ | |
| | GTKLEIKRTVAAPSVFIFPPSDEQLKSGTASVVCLLNNFYPREAKVQWKVDN | |
| | ALQSGNSQESVTEQDSKDSTYSLSSTLTLSKADYEKHKVYACEVTHQGLSSP | |
| | VTKSFNRGEC | |

P24492473

| | | |
|---|---|---|
| Heavy | QVQLVQSGAEVKKPGASVKVSCKASGYTFTENIIHWVRQAPGQGLEWMGWIH | 783 |
| Chain | PGSGSIKYAQKLQGRVTMTTDTSTSTAYMELRSLRSDDTAVYYCARHGGTGR | |
| | GAMDYWGQGTLVTVSSASTKGPSVFPLAPSSKSTSGGTAALGCLVKDYFPEP | |
| | VTVSWNSGALTSGVHTFPAVLQSSGLYSLSSVVTVPSSSLGTQTYICNVNHK | |
| | PSNTKVDKKVEPKSCDKTHTCPPCPAPELLGGPSVFLFPPKPKDTLMISRTP | |
| | EVTCVVVDVSHEDPEVKFNWYVDGVEVHNAKTKPREEQYNSTYRVVSVLTVL | |
| | HQDWLNGKEYKCKVSNKALPAPIEKTISKAKGQPREPQVYTLPPSRDELTKN | |
| | QVSLTCLVKGFYPSDIAVEWESNGQPENNYKTTPPVLDSDGSFFLYSKLTVD | |
| | KSRWQQGNVFSCSVMHEALHNHYTQKSLSLSPGK | |
| Light | EIVLTQSPGTLSLSPGERATLSCRASQSVSTSAYAYMHWYQQKPGQAPRLLI | 784 |
| Chain | YLASNLESGIPDRFSGSGSGTDFTLTISRLEPEDFAVYYCQQSRELPYTFGQ | |
| | GTKLEIKRTVAAPSVFIFPPSDEQLKSGTASVVCLLNNFYPREAKVQWKVDN | |
| | ALQSGNSQESVTEQDSKDSTYSLSSTLTLSKADYEKHKVYACEVTHQGLSSP | |
| | VTKSFNRGEC | |

P24492474

| | | |
|---|---|---|
| Heavy | QVQLVQSGAEVKKPGASVKVSCKASGYTFTENIIHWVRQAPGQGLEWMGWIH | 785 |
| Chain | PGSGSIKYAQKLQGRVTMTTDTSTSTAYMELRSLRSDDTAVYYCARHGGTGR | |
| | GAMDYWGQGTLVTVSSASTKGPSVFPLAPSSKSTSGGTAALGCLVKDYFPEP | |
| | VTVSWNSGALTSGVHTFPAVLQSSGLYSLSSVVTVPSSSLGTQTYICNVNHK | |
| | PSNTKVDKKVEPKSCDKTHTCPPCPAPELLGGPSVFLFPPKPKDTLMISRTP | |
| | EVTCVVVDVSHEDPEVKFNWYVDGVEVHNAKTKPREEQYNSTYRVVSVLTVL | |
| | HQDWLNGKEYKCKVSNKALPAPIEKTISKAKGQPREPQVYTLPPSRDELTKN | |
| | QVSLTCLVKGFYPSDIAVEWESNGQPENNYKTTPPVLDSDGSFFLYSKLTVD | |
| | KSRWQQGNVFSCSVMHEALHNHYTQKSLSLSPGK | |
| Light | EIVLTQSPGTLSLSPGERATLSCRASQSVSTSAYSAMHWYQQKPGQAPRLLI | 786 |
| Chain | YLASNLESGIPDRFSGSGSGTDFTLTISRLEPEDFAVYYCQQSRELPYTFGQ | |
| | GTKLEIKRTVAAPSVFIFPPSDEQLKSGTASVVCLLNNFYPREAKVQWKVDN | |
| | ALQSGNSQESVTEQDSKDSTYSLSSTLTLSKADYEKHKVYACEVTHQGLSSP | |
| | VTKSFNRGEC | |

P24492475

| | | |
|---|---|---|
| Heavy | QVQLVQSGAEVKKPGASVKVSCKASGYTFTENIIHWVRQAPGQGLEWMGWIH | 787 |
| Chain | PGSGSIKYAQKLQGRVTMTTDTSTSTAYMELRSLRSDDTAVYYCARHGGTGR | |
| | GAMDYWGQGTLVTVSSASTKGPSVFPLAPSSKSTSGGTAALGCLVKDYFPEP | |
| | VTVSWNSGALTSGVHTFPAVLQSSGLYSLSSVVTVPSSSLGTQTYICNVNHK | |
| | PSNTKVDKKVEPKSCDKTHTCPPCPAPELLGGPSVFLFPPKPKDTLMISRTP | |
| | EVTCVVVDVSHEDPEVKFNWYVDGVEVHNAKTKPREEQYNSTYRVVSVLTVL | |
| | HQDWLNGKEYKCKVSNKALPAPIEKTISKAKGQPREPQVYTLPPSRDELTKN | |
| | QVSLTCLVKGFYPSDIAVEWESNGQPENNYKTTPPVLDSDGSFFLYSKLTVD | |
| | KSRWQQGNVFSCSVMHEALHNHYTQKSLSLSPGK | |
| Light | EIVLTQSPGTLSLSPGERATLSCRASQSVSTSAYSYMAWYQQKPGQAPRLLI | 788 |
| Chain | YLASNLESGIPDRFSGSGSGTDFTLTISRLEPEDFAVYYCQQSRELPYTFGQ | |
| | GTKLEIKRTVAAPSVFIFPPSDEQLKSGTASVVCLLNNFYPREAKVQWKVDN | |
| | ALQSGNSQESVTEQDSKDSTYSLSSTLTLSKADYEKHKVYACEVTHQGLSSP | |
| | VTKSFNRGEC | |

P24492476

| | | |
|---|---|---|
| Heavy | QVQLVQSGAEVKKPGASVKVSCKASGYTFTENIIHWVRQAPGQGLEWMGWIH | 789 |
| Chain | PGSGSIKYAQKLQGRVTMTTDTSTSTAYMELRSLRSDDTAVYYCARHGGTGR | |
| | GAMDYWGQGTLVTVSSASTKGPSVFPLAPSSKSTSGGTAALGCLVKDYFPEP | |
| | VTVSWNSGALTSGVHTFPAVLQSSGLYSLSSVVTVPSSSLGTQTYICNVNHK | |
| | PSNTKVDKKVEPKSCDKTHTCPPCPAPELLGGPSVFLFPPKPKDTLMISRTP | |
| | EVTCVVVDVSHEDPEVKFNWYVDGVEVHNAKTKPREEQYNSTYRVVSVLTVL | |
| | HQDWLNGKEYKCKVSNKALPAPIEKTISKAKGQPREPQVYTLPPSRDELTKN | |
| | QVSLTCLVKGFYPSDIAVEWESNGQPENNYKTTPPVLDSDGSFFLYSKLTVD | |
| | KSRWQQGNVFSCSVMHEALHNHYTQKSLSLSPGK | |
| Light | EIVLTQSPGTLSLSPGERATLSCRASQSVSTSAYSYMHWYQQKPGQAPRLLI | 790 |
| Chain | YAASNLESGIPDRFSGSGSGTDFTLTISRLEPEDFAVYYCQQSRELPYTFGQ | |
| | GTKLEIKRTVAAPSVFIFPPSDEQLKSGTASVVCLLNNFYPREAKVQWKVDN | |
| | ALQSGNSQESVTEQDSKDSTYSLSSTLTLSKADYEKHKVYACEVTHQGLSSP | |
| | VTKSFNRGEC | |

P24492477

| | | |
|---|---|---|
| Heavy | QVQLVQSGAEVKKPGASVKVSCKASGYTFTENIIHWVRQAPGQGLEWMGWIH | 791 |
| Chain | PGSGSIKYAQKLQGRVTMTTDTSTSTAYMELRSLRSDDTAVYYCARHGGTGR | |
| | GAMDYWGQGTLVTVSSASTKGPSVFPLAPSSKSTSGGTAALGCLVKDYFPEP | |
| | VTVSWNSGALTSGVHTFPAVLQSSGLYSLSSVVTVPSSSLGTQTYICNVNHK | |
| | PSNTKVDKKVEPKSCDKTHTCPPCPAPELLGGPSVFLFPPKPKDTLMISRTP | |
| | EVTCVVVDVSHEDPEVKFNWYVDGVEVHNAKTKPREEQYNSTYRVVSVLTVL | |
| | HQDWLNGKEYKCKVSNKALPAPIEKTISKAKGQPREPQVYTLPPSRDELTKN | |
| | QVSLTCLVKGFYPSDIAVEWESNGQPENNYKTTPPVLDSDGSFFLYSKLTVD | |
| | KSRWQQGNVFSCSVMHEALHNHYTQKSLSLSPGK | |
| Light | EIVLTQSPGTLSLSPGERATLSCRASQSVSTSAYSYMHWYQQKPGQAPRLLI | 792 |
| Chain | YLAANLESGIPDRFSGSGSGTDFTLTISRLEPEDFAVYYCQQSRELPYTFGQ | |
| | GTKLEIKRTVAAPSVFIFPPSDEQLKSGTASVVCLLNNFYPREAKVQWKVDN | |
| | ALQSGNSQESVTEQDSKDSTYSLSSTLTLSKADYEKHKVYACEVTHQGLSSP | |
| | VTKSFNRGEC | |

P24492478

| | | |
|---|---|---|
| Heavy | QVQLVQSGAEVKKPGASVKVSCKASGYTFTENIIHWVRQAPGQGLEWMGWIH | 793 |
| Chain | PGSGSIKYAQKLQGRVTMTTDTSTSTAYMELRSLRSDDTAVYYCARHGGTGR | |
| | GAMDYWGQGTLVTVSSASTKGPSVFPLAPSSKSTSGGTAALGCLVKDYFPEP | |
| | VTVSWNSGALTSGVHTFPAVLQSSGLYSLSSVVTVPSSSLGTQTYICNVNHK | |
| | PSNTKVDKKVEPKSCDKTHTCPPCPAPELLGGPSVFLFPPKPKDTLMISRTP | |
| | EVTCVVVDVSHEDPEVKFNWYVDGVEVHNAKTKPREEQYNSTYRVVSVLTVL | |
| | HQDWLNGKEYKCKVSNKALPAPIEKTISKAKGQPREPQVYTLPPSRDELTKN | |
| | QVSLTCLVKGFYPSDIAVEWESNGQPENNYKTTPPVLDSDGSFFLYSKLTVD | |
| | KSRWQQGNVFSCSVMHEALHNHYTQKSLSLSPGK | |
| Light | EIVLTQSPGTLSLSPGERATLSCRASQSVSTSAYSYMHWYQQKPGQAPRLLI | 794 |
| Chain | YLASALESGIPDRFSGSGSGTDFTLTISRLEPEDFAVYYCQQSRELPYTFGQ | |
| | GTKLEIKRTVAAPSVFIFPPSDEQLKSGTASVVCLLNNFYPREAKVQWKVDN | |
| | ALQSGNSQESVTEQDSKDSTYSLSSTLTLSKADYEKHKVYACEVTHQGLSSP | |
| | VTKSFNRGEC | |

P24492479

| | | |
|---|---|---|
| Heavy | QVQLVQSGAEVKKPGASVKVSCKASGYTFTENIIHWVRQAPGQGLEWMGWIH | 795 |
| Chain | PGSGSIKYAQKLQGRVTMTTDTSTSTAYMELRSLRSDDTAVYYCARHGGTGR | |
| | GAMDYWGQGTLVTVSSASTKGPSVFPLAPSSKSTSGGTAALGCLVKDYFPEP | |
| | VTVSWNSGALTSGVHTFPAVLQSSGLYSLSSVVTVPSSSLGTQTYICNVNHK | |
| | PSNTKVDKKVEPKSCDKTHTCPPCPAPELLGGPSVFLFPPKPKDTLMISRTP | |
| | EVTCVVVDVSHEDPEVKFNWYVDGVEVHNAKTKPREEQYNSTYRVVSVLTVL | |
| | HQDWLNGKEYKCKVSNKALPAPIEKTISKAKGQPREPQVYTLPPSRDELTKN | |
| | QVSLTCLVKGFYPSDIAVEWESNGQPENNYKTTPPVLDSDGSFFLYSKLTVD | |
| | KSRWQQGNVFSCSVMHEALHNHYTQKSLSLSPGK | |
| Light | EIVLTQSPGTLSLSPGERATLSCRASQSVSTSAYSYMHWYQQKPGQAPRLLI | 796 |
| Chain | YLASNAESGIPDRFSGSGSGTDFTLTISRLEPEDFAVYYCQQSRELPYTFGQ | |
| | GTKLEIKRTVAAPSVFIFPPSDEQLKSGTASVVCLLNNFYPREAKVQWKVDN | |
| | ALQSGNSQESVTEQDSKDSTYSLSSTLTLSKADYEKHKVYACEVTHQGLSSP | |
| | VTKSFNRGEC | |

P24492480

| | | |
|---|---|---|
| Heavy | QVQLVQSGAEVKKPGASVKVSCKASGYTFTENIIHWVRQAPGQGLEWMGWIH | 797 |
| Chain | PGSGSIKYAQKLQGRVTMTTDTSTSTAYMELRSLRSDDTAVYYCARHGGTGR | |
| | GAMDYWGQGTLVTVSSASTKGPSVFPLAPSSKSTSGGTAALGCLVKDYFPEP | |
| | VTVSWNSGALTSGVHTFPAVLQSSGLYSLSSVVTVPSSSLGTQTYICNVNHK | |
| | PSNTKVDKKVEPKSCDKTHTCPPCPAPELLGGPSVFLFPPKPKDTLMISRTP | |
| | EVTCVVVDVSHEDPEVKFNWYVDGVEVHNAKTKPREEQYNSTYRVVSVLTVL | |
| | HQDWLNGKEYKCKVSNKALPAPIEKTISKAKGQPREPQVYTLPPSRDELTKN | |
| | QVSLTCLVKGFYPSDIAVEWESNGQPENNYKTTPPVLDSDGSFFLYSKLTVD | |
| | KSRWQQGNVFSCSVMHEALHNHYTQKSLSLSPGK | |
| Light | EIVLTQSPGTLSLSPGERATLSCRASQSVSTSAYSYMHWYQQKPGQAPRLLI | 798 |
| Chain | YLASNLASGIPDRFSGSGSGTDFTLTISRLEPEDFAVYYCQQSRELPYTFGQ | |
| | GTKLEIKRTVAAPSVFIFPPSDEQLKSGTASVVCLLNNFYPREAKVQWKVDN | |
| | ALQSGNSQESVTEQDSKDSTYSLSSTLTLSKADYEKHKVYACEVTHQGLSSP | |
| | VTKSFNRGEC | |

P24492481

| | | |
|---|---|---|
| Heavy | QVQLVQSGAEVKKPGASVKVSCKASGYTFTENIIHWVRQAPGQGLEWMGWIH | 799 |
| Chain | PGSGSIKYAQKLQGRVTMTTDTSTSTAYMELRSLRSDDTAVYYCARHGGTGR | |
| | GAMDYWGQGTLVTVSSASTKGPSVFPLAPSSKSTSGGTAALGCLVKDYFPEP | |
| | VTVSWNSGALTSGVHTFPAVLQSSGLYSLSSVVTVPSSSLGTQTYICNVNHK | |
| | PSNTKVDKKVEPKSCDKTHTCPPCPAPELLGGPSVFLFPPKPKDTLMISRTP | |
| | EVTCVVVDVSHEDPEVKFNWYVDGVEVHNAKTKPREEQYNSTYRVVSVLTVL | |
| | HQDWLNGKEYKCKVSNKALPAPIEKTISKAKGQPREPQVYTLPPSRDELTKN | |
| | QVSLTCLVKGFYPSDIAVEWESNGQPENNYKTTPPVLDSDGSFFLYSKLTVD | |
| | KSRWQQGNVFSCSVMHEALHNHYTQKSLSLSPGK | |
| Light | EIVLTQSPGTLSLSPGERATLSCRASQSVSTSAYSYMHWYQQKPGQAPRLLI | 800 |
| Chain | YLASNLEAGIPDRFSGSGSGTDFTLTISRLEPEDFAVYYCQQSRELPYTFGQ | |
| | GTKLEIKRTVAAPSVFIFPPSDEQLKSGTASVVCLLNNFYPREAKVQWKVDN | |
| | ALQSGNSQESVTEQDSKDSTYSLSSTLTLSKADYEKHKVYACEVTHQGLSSP | |
| | VTKSFNRGEC | |

P24492482

| | | |
|---|---|---|
| Heavy | QVQLVQSGAEVKKPGASVKVSCKASGYTFTENIIHWVRQAPGQGLEWMGWIH | 801 |
| Chain | PGSGSIKYAQKLQGRVTMTTDTSTSTAYMELRSLRSDDTAVYYCARHGGTGR | |
| | GAMDYWGQGTLVTVSSASTKGPSVFPLAPSSKSTSGGTAALGCLVKDYFPEP | |
| | VTVSWNSGALTSGVHTFPAVLQSSGLYSLSSVVTVPSSSLGTQTYICNVNHK | |
| | PSNTKVDKKVEPKSCDKTHTCPPCPAPELLGGPSVFLFPPKPKDTLMISRTP | |
| | EVTCVVVDVSHEDPEVKFNWYVDGVEVHNAKTKPREEQYNSTYRVVSVLTVL | |
| | HQDWLNGKEYKCKVSNKALPAPIEKTISKAKGQPREPQVYTLPPSRDELTKN | |
| | QVSLTCLVKGFYPSDIAVEWESNGQPENNYKTTPPVLDSDGSFFLYSKLTVD | |
| | KSRWQQGNVFSCSVMHEALHNHYTQKSLSLSPGK | |
| Light | EIVLTQSPGTLSLSPGERATLSCRASQSVSTSAYSYMHWYQQKPGQAPRLLI | 802 |
| Chain | YLASNLESGIPDRFSGSGSGTDFTLTISRLEPEDFAVYYCQQARELPYTFGQ | |
| | GTKLEIKRTVAAPSVFIFPPSDEQLKSGTASVVCLLNNFYPREAKVQWKVDN | |
| | ALQSGNSQESVTEQDSKDSTYSLSSTLTLSKADYEKHKVYACEVTHQGLSSP | |
| | VTKSFNRGEC | |

P24492483

| | | |
|---|---|---|
| Heavy | QVQLVQSGAEVKKPGASVKVSCKASGYTFTENIIHWVRQAPGQGLEWMGWIH | 803 |
| Chain | PGSGSIKYAQKLQGRVTMTTDTSTSTAYMELRSLRSDDTAVYYCARHGGTGR | |
| | GAMDYWGQGTLVTVSSASTKGPSVFPLAPSSKSTSGGTAALGCLVKDYFPEP | |
| | VTVSWNSGALTSGVHTFPAVLQSSGLYSLSSVVTVPSSSLGTQTYICNVNHK | |
| | PSNTKVDKKVEPKSCDKTHTCPPCPAPELLGGPSVFLFPPKPKDTLMISRTP | |
| | EVTCVVVDVSHEDPEVKFNWYVDGVEVHNAKTKPREEQYNSTYRVVSVLTVL | |
| | HQDWLNGKEYKCKVSNKALPAPIEKTISKAKGQPREPQVYTLPPSRDELTKN | |
| | QVSLTCLVKGFYPSDIAVEWESNGQPENNYKTTPPVLDSDGSFFLYSKLTVD | |
| | KSRWQQGNVFSCSVMHEALHNHYTQKSLSLSPGK | |
| Light | EIVLTQSPGTLSLSPGERATLSCRASQSVSTSAYSYMHWYQQKPGQAPRLLI | 804 |
| Chain | YLASNLESGIPDRFSGSGSGTDFTLTISRLEPEDFAVYYCQQSAELPYTFGQ | |
| | GTKLEIKRTVAAPSVFIFPPSDEQLKSGTASVVCLLNNFYPREAKVQWKVDN | |
| | ALQSGNSQESVTEQDSKDSTYSLSSTLTLSKADYEKHKVYACEVTHQGLSSP | |
| | VTKSFNRGEC | |

P24492484

| | | |
|---|---|---|
| Heavy | QVQLVQSGAEVKKPGASVKVSCKASGYTFTENIIHWVRQAPGQGLEWMGWIH | 805 |
| Chain | PGSGSIKYAQKLQGRVTMTTDTSTSTAYMELRSLRSDDTAVYYCARHGGTGR | |
| | GAMDYWGQGTLVTVSSASTKGPSVFPLAPSSKSTSGGTAALGCLVKDYFPEP | |
| | VTVSWNSGALTSGVHTFPAVLQSSGLYSLSSVVTVPSSSLGTQTYICNVNHK | |
| | PSNTKVDKKVEPKSCDKTHTCPPCPAPELLGGPSVFLFPPKPKDTLMISRTP | |
| | EVTCVVVDVSHEDPEVKFNWYVDGVEVHNAKTKPREEQYNSTYRVVSVLTVL | |
| | HQDWLNGKEYKCKVSNKALPAPIEKTISKAKGQPREPQVYTLPPSRDELTKN | |
| | QVSLTCLVKGFYPSDIAVEWESNGQPENNYKTTPPVLDSDGSFFLYSKLTVD | |
| | KSRWQQGNVFSCSVMHEALHNHYTQKSLSLSPGK | |
| Light | EIVLTQSPGTLSLSPGERATLSCRASQSVSTSAYSYMHWYQQKPGQAPRLLI | 806 |
| Chain | YLASNLESGIPDRFSGSGSGTDFTLTISRLEPEDFAVYYCQQSRALPYTFGQ | |
| | GTKLEIKRTVAAPSVFIFPPSDEQLKSGTASVVCLLNNFYPREAKVQWKVDN | |
| | ALQSGNSQESVTEQDSKDSTYSLSSTLTLSKADYEKHKVYACEVTHQGLSSP | |
| | VTKSFNRGEC | |

P24492485

| | | |
|---|---|---|
| Heavy | QVQLVQSGAEVKKPGASVKVSCKASGYTFTENIIHWVRQAPGQGLEWMGWIH | 807 |
| Chain | PGSGSIKYAQKLQGRVTMTTDTSTSTAYMELRSLRSDDTAVYYCARHGGTGR | |
| | GAMDYWGQGTLVTVSSASTKGPSVFPLAPSSKSTSGGTAALGCLVKDYFPEP | |
| | VTVSWNSGALTSGVHTFPAVLQSSGLYSLSSVVTVPSSSLGTQTYICNVNHK | |
| | PSNTKVDKKVEPKSCDKTHTCPPCPAPELLGGPSVFLFPPKPKDTLMISRTP | |
| | EVTCVVVDVSHEDPEVKFNWYVDGVEVHNAKTKPREEQYNSTYRVVSVLTVL | |
| | HQDWLNGKEYKCKVSNKALPAPIEKTISKAKGQPREPQVYTLPPSRDELTKN | |
| | QVSLTCLVKGFYPSDIAVEWESNGQPENNYKTTPPVLDSDGSFFLYSKLTVD | |
| | KSRWQQGNVFSCSVMHEALHNHYTQKSLSLSPGK | |
| Light | EIVLTQSPGTLSLSPGERATLSCRASQSVSTSAYSYMHWYQQKPGQAPRLLI | 808 |
| Chain | YLASNLESGIPDRFSGSGSGTDFTLTISRLEPEDFAVYYCQQSREAPYTFGQ | |
| | GTKLEIKRTVAAPSVFIFPPSDEQLKSGTASVVCLLNNFYPREAKVQWKVDN | |
| | ALQSGNSQESVTEQDSKDSTYSLSSTLTLSKADYEKHKVYACEVTHQGLSSP | |
| | VTKSFNRGEC | |

P24492537

| | | |
|---|---|---|
| Heavy | QVQLVQSGAEVKKPGASVKVSCKASGYTFTENIIHWVRQAPGQGLEWMGWIH | 809 |
| Chain | PGSGSIKYAQKLQGRVTMTTDTSTSTAYMELRSLRSDDTAVYYCARHGGTGR | |
| | GAMDYWGQGTLVTVSSASTKGPSVFPLAPSSKSTSGGTAALGCLVKDYFPEP | |
| | VTVSWNSGALTSGVHTFPAVLQSSGLYSLSSVVTVPSSSLGTQTYICNVNHK | |
| | PSNTKVDKKVEPKSCDKTHTCPPCPAPELLGGPSVFLFPPKPKDTLMISRTP | |
| | EVTCVVVDVSHEDPEVKFNWYVDGVEVHNAKTKPREEQYNSTYRVVSVLTVL | |
| | HQDWLNGKEYKCKVSNKALPAPIEKTISKAKGQPREPQVYTLPPSRDELTKN | |
| | QVSLTCLVKGFYPSDIAVEWESNGQPENNYKTTPPVLDSDGSFFLYSKLTVD | |
| | KSRWQQGNVFSCSVMHEALHNHYTQKSLSLSPGK | |
| Light | EIVLTQSPGTLSLSPGERATLSCRASQSVSTSAYSYMHWYQQKPGQAPRLLI | 810 |
| Chain | YAASNLESGIPDRFSGSGSGTDFTLTISRLEPEDFAVYYCQQSREAPYTFGQ | |
| | GTKLEIKRTVAAPSVFIFPPSDEQLKSGTASVVCLLNNFYPREAKVQWKVDN | |
| | ALQSGNSQESVTEQDSKDSTYSLSSTLTLSKADYEKHKVYACEVTHQGLSSP | |
| | VTKSFNRGEC | |

P24492538

| | | |
|---|---|---|
| Heavy | QVQLVQSGAEVKKPGASVKVSCKASGYTFTENIIHWVRQAPGQGLEWMGWIH | 811 |
| Chain | PGSGSIKYAQKLQGRVTMTTDTSTSTAYMELRSLRSDDTAVYYCARHGGTGR | |
| | GAMDYWGQGTLVTVSSASTKGPSVFPLAPSSKSTSGGTAALGCLVKDYFPEP | |
| | VTVSWNSGALTSGVHTFPAVLQSSGLYSLSSVVTVPSSSLGTQTYICNVNHK | |
| | PSNTKVDKKVEPKSCDKTHTCPPCPAPELLGGPSVFLFPPKPKDTLMISRTP | |
| | EVTCVVVDVSHEDPEVKFNWYVDGVEVHNAKTKPREEQYNSTYRVVSVLTVL | |
| | HQDWLNGKEYKCKVSNKALPAPIEKTISKAKGQPREPQVYTLPPSRDELTKN | |
| | QVSLTCLVKGFYPSDIAVEWESNGQPENNYKTTPPVLDSDGSFFLYSKLTVD | |
| | KSRWQQGNVFSCSVMHEALHNHYTQKSLSLSPGK | |
| Light | EIVLTQSPGTLSLSPGERATLSCRASQSVSTSAYSYMHWYQQKPGQAPRLLI | 812 |
| Chain | YGASNLESGIPDRFSGSGSGTDFTLTISRLEPEDFAVYYCQQSREAPYTFGQ | |
| | GTKLEIKRTVAAPSVFIFPPSDEQLKSGTASVVCLLNNFYPREAKVQWKVDN | |
| | ALQSGNSQESVTEQDSKDSTYSLSSTLTLSKADYEKHKVYACEVTHQGLSSP | |
| | VTKSFNRGEC | |

P24492539

| | | |
|---|---|---|
| Heavy | QVQLVQSGAEVKKPGASVKVSCKASGYTFTENIIHWVRQAPGQGLEWMGWIH | 813 |
| Chain | PGSGSIKYAQKLQGRVTMTTDTSTSTAYMELRSLRSDDTAVYYCARHGGTGR | |
| | GAMDYWGQGTLVTVSSASTKGPSVFPLAPSSKSTSGGTAALGCLVKDYFPEP | |
| | VTVSWNSGALTSGVHTFPAVLQSSGLYSLSSVVTVPSSSLGTQTYICNVNHK | |
| | PSNTKVDKKVEPKSCDKTHTCPPCPAPELLGGPSVFLFPPKPKDTLMISRTP | |
| | EVTCVVVDVSHEDPEVKFNWYVDGVEVHNAKTKPREEQYNSTYRVVSVLTVL | |
| | HQDWLNGKEYKCKVSNKALPAPIEKTISKAKGQPREPQVYTLPPSRDELTKN | |
| | QVSLTCLVKGFYPSDIAVEWESNGQPENNYKTTPPVLDSDGSFFLYSKLTVD | |
| | KSRWQQGNVFSCSVMHEALHNHYTQKSLSLSPGK | |
| Light | EIVLTQSPGTLSLSPGERATLSCRASQSVSTSAYSYMHWYQQKPGQAPRLLI | 814 |
| Chain | YGASNLESGIPDRFSGSGSGTDFTLTISRLEPEDFAVYYCQQSREYPYTFGQ | |
| | GTKLEIKRTVAAPSVFIFPPSDEQLKSGTASVVCLLNNFYPREAKVQWKVDN | |
| | ALQSGNSQESVTEQDSKDSTYSLSSTLTLSKADYEKHKVYACEVTHQGLSSP | |
| | VTKSFNRGEC | |

P24502158

| | | |
|---|---|---|
| Heavy | QVQLVQSGAEVKKPGASVKVSCKASGYTFTANIIHWVRQAPGQGLEWMGWIH | 815 |
| Chain | PGSGSIKYAQKLQGRVTMTTDTSTSTAYMELRSLRSDDTAVYYCARHGGTGR | |
| | GAMDYWGQGTLVTVSSASTKGPSVFPLAPSSKSTSGGTAALGCLVKDYFPEP | |
| | VTVSWNSGALTSGVHTFPAVLQSSGLYSLSSVVTVPSSSLGTQTYICNVNHK | |
| | PSNTKVDKKVEPKSCDKTHTCPPCPAPELLGGPSVFLFPPKPKDTLMISRTP | |
| | EVTCVVVDVSHEDPEVKFNWYVDGVEVHNAKTKPREEQYNSTYRVVSVLTVL | |
| | HQDWLNGKEYKCKVSNKALPAPIEKTISKAKGQPREPQVYTLPPSRDELTKN | |
| | QVSLTCLVKGFYPSDIAVEWESNGQPENNYKTTPPVLDSDGSFFLYSKLTVD | |
| | KSRWQQGNVFSCSVMHEALHNHYTQKSLSLSPGK | |
| Light | EIVLTQSPGTLSLSPGERATLSCRASQSVSTSAYSYMHWYQQKPGQAPRLLI | 816 |
| Chain | YLASNLESGIPDRFSGSGSGTDFTLTISRLEPEDFAVYYCQQSRELPYTFGQ | |
| | GTKLEIKRTVAAPSVFIFPPSDEQLKSGTASVVCLLNNFYPREAKVQWKVDN | |
| | ALQSGNSQESVTEQDSKDSTYSLSSTLTLSKADYEKHKVYACEVTHQGLSSP | |
| | VTKSFNRGEC | |

P24502476

| | | |
|---|---|---|
| Heavy | QVQLVQSGAEVKKPGASVKVSCKASGYTFTANIIHWVRQAPGQGLEWMGWIH | 817 |
| Chain | PGSGSIKYAQKLQGRVTMTTDTSTSTAYMELRSLRSDDTAVYYCARHGGTGR | |
| | GAMDYWGQGTLVTVSSASTKGPSVFPLAPSSKSTSGGTAALGCLVKDYFPEP | |
| | VTVSWNSGALTSGVHTFPAVLQSSGLYSLSSVVTVPSSSLGTQTYICNVNHK | |
| | PSNTKVDKKVEPKSCDKTHTCPPCPAPELLGGPSVFLFPPKPKDTLMISRTP | |
| | EVTCVVVDVSHEDPEVKFNWYVDGVEVHNAKTKPREEQYNSTYRVVSVLTVL | |
| | HQDWLNGKEYKCKVSNKALPAPIEKTISKAKGQPREPQVYTLPPSRDELTKN | |
| | QVSLTCLVKGFYPSDIAVEWESNGQPENNYKTTPPVLDSDGSFFLYSKLTVD | |
| | KSRWQQGNVFSCSVMHEALHNHYTQKSLSLSPGK | |
| Light | EIVLTQSPGTLSLSPGERATLSCRASQSVSTSAYSYMHWYQQKPGQAPRLLI | 818 |
| Chain | YAASNLESGIPDRFSGSGSGTDFTLTISRLEPEDFAVYYCQQSRELPYTFGQ | |
| | GTKLEIKRTVAAPSVFIFPPSDEQLKSGTASVVCLLNNFYPREAKVQWKVDN | |
| | ALQSGNSQESVTEQDSKDSTYSLSSTLTLSKADYEKHKVYACEVTHQGLSSP | |
| | VTKSFNRGEC | |

P24502485

| | | |
|---|---|---|
| Heavy | QVQLVQSGAEVKKPGASVKVSCKASGYTFTANIIHWVRQAPGQGLEWMGWIH | 819 |
| Chain | PGSGSIKYAQKLQGRVTMTTDTSTSTAYMELRSLRSDDTAVYYCARHGGTGR | |
| | GAMDYWGQGTLVTVSSASTKGPSVFPLAPSSKSTSGGTAALGCLVKDYFPEP | |
| | VTVSWNSGALTSGVHTFPAVLQSSGLYSLSSVVTVPSSSLGTQTYICNVNHK | |
| | PSNTKVDKKVEPKSCDKTHTCPPCPAPELLGGPSVFLFPPKPKDTLMISRTP | |
| | EVTCVVVDVSHEDPEVKFNWYVDGVEVHNAKTKPREEQYNSTYRVVSVLTVL | |
| | HQDWLNGKEYKCKVSNKALPAPIEKTISKAKGQPREPQVYTLPPSRDELTKN | |
| | QVSLTCLVKGFYPSDIAVEWESNGQPENNYKTTPPVLDSDGSFFLYSKLTVD | |
| | KSRWQQGNVFSCSVMHEALHNHYTQKSLSLSPGK | |
| Light | EIVLTQSPGTLSLSPGERATLSCRASQSVSTSAYSYMHWYQQKPGQAPRLLI | 820 |
| Chain | YLASNLESGIPDRFSGSGSGTDFTLTISRLEPEDFAVYYCQQSREAPYTFGQ | |
| | GTKLEIKRTVAAPSVFIFPPSDEQLKSGTASVVCLLNNFYPREAKVQWKVDN | |
| | ALQSGNSQESVTEQDSKDSTYSLSSTLTLSKADYEKHKVYACEVTHQGLSSP | |
| | VTKSFNRGEC | |

P24502537

| | | |
|---|---|---|
| Heavy | QVQLVQSGAEVKKPGASVKVSCKASGYTFTANIIHWVRQAPGQGLEWMGWIH | 821 |
| Chain | PGSGSIKYAQKLQGRVTMTTDTSTSTAYMELRSLRSDDTAVYYCARHGGTGR | |
| | GAMDYWGQGTLVTVSSASTKGPSVFPLAPSSKSTSGGTAALGCLVKDYFPEP | |
| | VTVSWNSGALTSGVHTFPAVLQSSGLYSLSSVVTVPSSSLGTQTYICNVNHK | |
| | PSNTKVDKKVEPKSCDKTHTCPPCPAPELLGGPSVFLFPPKPKDTLMISRTP | |
| | EVTCVVVDVSHEDPEVKFNWYVDGVEVHNAKTKPREEQYNSTYRVVSVLTVL | |
| | HQDWLNGKEYKCKVSNKALPAPIEKTISKAKGQPREPQVYTLPPSRDELTKN | |
| | QVSLTCLVKGFYPSDIAVEWESNGQPENNYKTTPPVLDSDGSFFLYSKLTVD | |
| | KSRWQQGNVFSCSVMHEALHNHYTQKSLSLSPGK | |
| Light | EIVLTQSPGTLSLSPGERATLSCRASQSVSTSAYSYMHWYQQKPGQAPRLLI | 822 |
| Chain | YAASNLESGIPDRFSGSGSGTDFTLTISRLEPEDFAVYYCQQSREAPYTFGQ | |
| | GTKLEIKRTVAAPSVFIFPPSDEQLKSGTASVVCLLNNFYPREAKVQWKVDN | |
| | ALQSGNSQESVTEQDSKDSTYSLSSTLTLSKADYEKHKVYACEVTHQGLSSP | |
| | VTKSFNRGEC | |

P24502538

| | | |
|---|---|---|
| Heavy | QVQLVQSGAEVKKPGASVKVSCKASGYTFTANIIHWVRQAPGQGLEWMGWIH | 823 |
| Chain | PGSGSIKYAQKLQGRVTMTTDTSTSTAYMELRSLRSDDTAVYYCARHGGTGR | |
| | GAMDYWGQGTLVTVSSASTKGPSVFPLAPSSKSTSGGTAALGCLVKDYFPEP | |
| | VTVSWNSGALTSGVHTFPAVLQSSGLYSLSSVVTVPSSSLGTQTYICNVNHK | |
| | PSNTKVDKKVEPKSCDKTHTCPPCPAPELLGGPSVFLFPPKPKDTLMISRTP | |
| | EVTCVVVDVSHEDPEVKFNWYVDGVEVHNAKTKPREEQYNSTYRVVSVLTVL | |
| | HQDWLNGKEYKCKVSNKALPAPIEKTISKAKGQPREPQVYTLPPSRDELTKN | |
| | QVSLTCLVKGFYPSDIAVEWESNGQPENNYKTTPPVLDSDGSFFLYSKLTVD | |
| | KSRWQQGNVFSCSVMHEALHNHYTQKSLSLSPGK | |
| Light | EIVLTQSPGTLSLSPGERATLSCRASQSVSTSAYSYMHWYQQKPGQAPRLLI | 824 |
| Chain | YGASNLESGIPDRESGSGSGTDFTLTISRLEPEDFAVYYCQQSREAPYTFGQ | |
| | GTKLEIKRTVAAPSVFIFPPSDEQLKSGTASVVCLLNNFYPREAKVQWKVDN | |
| | ALQSGNSQESVTEQDSKDSTYSLSSTLTLSKADYEKHKVYACEVTHQGLSSP | |
| | VTKSFNRGEC | |

P24502539

| | | |
|---|---|---|
| Heavy | QVQLVQSGAEVKKPGASVKVSCKASGYTFTANIIHWVRQAPGQGLEWMGWIH | 825 |
| Chain | PGSGSIKYAQKLQGRVTMTTDTSTSTAYMELRSLRSDDTAVYYCARHGGTGR | |
| | GAMDYWGQGTLVTVSSASTKGPSVFPLAPSSKSTSGGTAALGCLVKDYFPEP | |
| | VTVSWNSGALTSGVHTFPAVLQSSGLYSLSSVVTVPSSSLGTQTYICNVNHK | |
| | PSNTKVDKKVEPKSCDKTHTCPPCPAPELLGGPSVFLFPPKPKDTLMISRTP | |
| | EVTCVVVDVSHEDPEVKFNWYVDGVEVHNAKTKPREEQYNSTYRVVSVLTVL | |
| | HQDWLNGKEYKCKVSNKALPAPIEKTISKAKGQPREPQVYTLPPSRDELTKN | |
| | QVSLTCLVKGFYPSDIAVEWESNGQPENNYKTTPPVLDSDGSFFLYSKLTVD | |
| | KSRWQQGNVFSCSVMHEALHNHYTQKSLSLSPGK | |
| Light | EIVLTQSPGTLSLSPGERATLSCRASQSVSTSAYSYMHWYQQKPGQAPRLLI | 826 |
| Chain | YGASNLESGIPDRFSGSGSGTDFTLTISRLEPEDFAVYYCQQSREYPYTFGQ | |
| | GTKLEIKRTVAAPSVFIFPPSDEQLKSGTASVVCLLNNFYPREAKVQWKVDN | |
| | ALQSGNSQESVTEQDSKDSTYSLSSTLTLSKADYEKHKVYACEVTHQGLSSP | |
| | VTKSFNRGEC | |

P24512158

| | | |
|---|---|---|
| Heavy | QVQLVQSGAEVKKPGASVKVSCKASGYTFTEAITHWVRQAPGQGLEWMGWIH | 827 |
| Chain | PGSGSIKYAQKLQGRVTMTTDTSTSTAYMELRSLRSDDTAVYYCARHGGTGR | |
| | GAMDYWGQGTLVTVSSASTKGPSVFPLAPSSKSTSGGTAALGCLVKDYFPEP | |
| | VTVSWNSGALTSGVHTFPAVLQSSGLYSLSSVVTVPSSSLGTQTYICNVNHK | |
| | PSNTKVDKKVEPKSCDKTHTCPPCPAPELLGGPSVFLFPPKPKDTLMISRTP | |
| | EVTCVVVDVSHEDPEVKFNWYVDGVEVHNAKTKPREEQYNSTYRVVSVLTVL | |
| | HQDWLNGKEYKCKVSNKALPAPIEKTISKAKGQPREPQVYTLPPSRDELTKN | |
| | QVSLTCLVKGFYPSDIAVEWESNGQPENNYKTTPPVLDSDGSFFLYSKLTVD | |
| | KSRWQQGNVFSCSVMHEALHNHYTQKSLSLSPGK | |
| Light | EIVLTQSPGTLSLSPGERATLSCRASQSVSTSAYSYMHWYQQKPGQAPRLLI | 828 |
| Chain | YLASNLESGIPDRFSGSGSGTDFTLTISRLEPEDFAVYYCQQSRELPYTFGQ | |
| | GTKLEIKRTVAAPSVFIFPPSDEQLKSGTASVVCLLNNFYPREAKVQWKVDN | |
| | ALQSGNSQESVTEQDSKDSTYSLSSTLTLSKADYEKHKVYACEVTHQGLSSP | |
| | VTKSFNRGEC | |

P24512476

| | | |
|---|---|---|
| Heavy | QVQLVQSGAEVKKPGASVKVSCKASGYTFTEAIIHWVRQAPGQGLEWMGWIH | 829 |
| Chain | PGSGSIKYAQKLQGRVTMTTDTSTSTAYMELRSLRSDDTAVYYCARHGGTGR | |
| | GAMDYWGQGTLVTVSSASTKGPSVFPLAPSSKSTSGGTAALGCLVKDYFPEP | |
| | VTVSWNSGALTSGVHTFPAVLQSSGLYSLSSVVTVPSSSLGTQTYICNVNHK | |
| | PSNTKVDKKVEPKSCDKTHTCPPCPAPELLGGPSVFLFPPKPKDTLMISRTP | |
| | EVTCVVVDVSHEDPEVKFNWYVDGVEVHNAKTKPREEQYNSTYRVVSVLTVL | |
| | HQDWLNGKEYKCKVSNKALPAPIEKTISKAKGQPREPQVYTLPPSRDELTKN | |
| | QVSLTCLVKGFYPSDIAVEWESNGQPENNYKTTPPVLDSDGSFFLYSKLTVD | |
| | KSRWQQGNVFSCSVMHEALHNHYTQKSLSLSPGK | |
| Light | EIVLTQSPGTLSLSPGERATLSCRASQSVSTSAYSYMHWYQQKPGQAPRLLI | 830 |
| Chain | YAASNLESGIPDRFSGSGSGTDFTLTISRLEPEDFAVYYCQQSRELPYTFGQ | |
| | GTKLEIKRTVAAPSVFIFPPSDEQLKSGTASVVCLLNNFYPREAKVQWKVDN | |
| | ALQSGNSQESVTEQDSKDSTYSLSSTLTLSKADYEKHKVYACEVTHQGLSSP | |
| | VTKSFNRGEC | |

P24512485

| | | |
|---|---|---|
| Heavy | QVQLVQSGAEVKKPGASVKVSCKASGYTFTEAIIHWVRQAPGQGLEWMGWIH | 831 |
| Chain | PGSGSIKYAQKLQGRVTMTTDTSTSTAYMELRSLRSDDTAVYYCARHGGTGR | |
| | GAMDYWGQGTLVTVSSASTKGPSVFPLAPSSKSTSGGTAALGCLVKDYFPEP | |
| | VTVSWNSGALTSGVHTFPAVLQSSGLYSLSSVVTVPSSSLGTQTYICNVNHK | |
| | PSNTKVDKKVEPKSCDKTHTCPPCPAPELLGGPSVFLFPPKPKDTLMISRTP | |
| | EVTCVVVDVSHEDPEVKFNWYVDGVEVHNAKTKPREEQYNSTYRVVSVLTVL | |
| | HQDWLNGKEYKCKVSNKALPAPIEKTISKAKGQPREPQVYTLPPSRDELTKN | |
| | QVSLTCLVKGFYPSDIAVEWESNGQPENNYKTTPPVLDSDGSFFLYSKLTVD | |
| | KSRWQQGNVFSCSVMHEALHNHYTQKSLSLSPGK | |
| Light | EIVLTQSPGTLSLSPGERATLSCRASQSVSTSAYSYMHWYQQKPGQAPRLLI | 832 |
| Chain | YLASNLESGIPDRFSGSGSGTDFTLTISRLEPEDFAVYYCQQSREAPYTFGQ | |
| | GTKLEIKRTVAAPSVFIFPPSDEQLKSGTASVVCLLNNFYPREAKVQWKVDN | |
| | ALQSGNSQESVTEQDSKDSTYSLSSTLTLSKADYEKHKVYACEVTHQGLSSP | |
| | VTKSFNRGEC | |

P24522158

| | | |
|---|---|---|
| Heavy | QVQLVQSGAEVKKPGASVKVSCKASGYTFTENAIHWVRQAPGQGLEWMGWIH | 833 |
| Chain | PGSGSIKYAQKLQGRVTMTTDTSTSTAYMELRSLRSDDTAVYYCARHGGTGR | |
| | GAMDYWGQGTLVTVSSASTKGPSVFPLAPSSKSTSGGTAALGCLVKDYFPEP | |
| | VTVSWNSGALTSGVHTFPAVLQSSGLYSLSSVVTVPSSSLGTQTYICNVNHK | |
| | PSNTKVDKKVEPKSCDKTHTCPPCPAPELLGGPSVFLFPPKPKDTLMISRTP | |
| | EVTCVVVDVSHEDPEVKFNWYVDGVEVHNAKTKPREEQYNSTYRVVSVLTVL | |
| | HQDWLNGKEYKCKVSNKALPAPIEKTISKAKGQPREPQVYTLPPSRDELTKN | |
| | QVSLTCLVKGFYPSDIAVEWESNGQPENNYKTTPPVLDSDGSFFLYSKLTVD | |
| | KSRWQQGNVFSCSVMHEALHNHYTQKSLSLSPGK | |
| Light | EIVLTQSPGTLSLSPGERATLSCRASQSVSTSAYSYMHWYQQKPGQAPRLLI | 834 |
| Chain | YLASNLESGIPDRFSGSGSGTDFTLTISRLEPEDFAVYYCQQSRELPYTFGQ | |
| | GTKLEIKRTVAAPSVFIFPPSDEQLKSGTASVVCLLNNFYPREAKVQWKVDN | |
| | ALQSGNSQESVTEQDSKDSTYSLSSTLTLSKADYEKHKVYACEVTHQGLSSP | |
| | VTKSFNRGEC | |

P24532158

| | | |
|---|---|---|
| Heavy | QVQLVQSGAEVKKPGASVKVSCKASGYTFTENIAHWVRQAPGQGLEWMGWIH | 835 |
| Chain | PGSGSIKYAQKLQGRVTMTTDTSTSTAYMELRSLRSDDTAVYYCARHGGTGR | |
| | GAMDYWGQGTLVTVSSASTKGPSVFPLAPSSKSTSGGTAALGCLVKDYFPEP | |
| | VTVSWNSGALTSGVHTFPAVLQSSGLYSLSSVVTVPSSSLGTQTYICNVNHK | |
| | PSNTKVDKKVEPKSCDKTHTCPPCPAPELLGGPSVFLFPPKPKDTLMISRTP | |
| | EVTCVVVDVSHEDPEVKFNWYVDGVEVHNAKTKPREEQYNSTYRVVSVLTVL | |
| | HQDWLNGKEYKCKVSNKALPAPIEKTISKAKGQPREPQVYTLPPSRDELTKN | |
| | QVSLTCLVKGFYPSDIAVEWESNGQPENNYKTTPPVLDSDGSFFLYSKLTVD | |
| | KSRWQQGNVFSCSVMHEALHNHYTQKSLSLSPGK | |
| Light | EIVLTQSPGTLSLSPGERATLSCRASQSVSTSAYSYMHWYQQKPGQAPRLLI | 836 |
| Chain | YLASNLESGIPDRFSGSGSGTDFTLTISRLEPEDFAVYYCQQSRELPYTFGQ | |
| | GTKLEIKRTVAAPSVFIFPPSDEQLKSGTASVVCLLNNFYPREAKVQWKVDN | |
| | ALQSGNSQESVTEQDSKDSTYSLSSTLTLSKADYEKHKVYACEVTHQGLSSP | |
| | VTKSFNRGEC | |

P24542158

| | | |
|---|---|---|
| Heavy | QVQLVQSGAEVKKPGASVKVSCKASGYTFTENIIAWVRQAPGQGLEWMGWIH | 837 |
| Chain | PGSGSIKYAQKLQGRVTMTTDTSTSTAYMELRSLRSDDTAVYYCARHGGTGR | |
| | GAMDYWGQGTLVTVSSASTKGPSVFPLAPSSKSTSGGTAALGCLVKDYFPEP | |
| | VTVSWNSGALTSGVHTFPAVLQSSGLYSLSSVVTVPSSSLGTQTYICNVNHK | |
| | PSNTKVDKKVEPKSCDKTHTCPPCPAPELLGGPSVFLFPPKPKDTLMISRTP | |
| | EVTCVVVDVSHEDPEVKFNWYVDGVEVHNAKTKPREEQYNSTYRVVSVLTVL | |
| | HQDWLNGKEYKCKVSNKALPAPIEKTISKAKGQPREPQVYTLPPSRDELTKN | |
| | QVSLTCLVKGFYPSDIAVEWESNGQPENNYKTTPPVLDSDGSFFLYSKLTVD | |
| | KSRWQQGNVFSCSVMHEALHNHYTQKSLSLSPGK | |
| Light | EIVLTQSPGTLSLSPGERATLSCRASQSVSTSAYSYMHWYQQKPGQAPRLLI | 838 |
| Chain | YLASNLESGIPDRFSGSGSGTDFTLTISRLEPEDFAVYYCQQSRELPYTFGQ | |
| | GTKLEIKRTVAAPSVFIFPPSDEQLKSGTASVVCLLNNFYPREAKVQWKVDN | |
| | ALQSGNSQESVTEQDSKDSTYSLSSTLTLSKADYEKHKVYACEVTHQGLSSP | |
| | VTKSFNRGEC | |

P24552158

| | | |
|---|---|---|
| Heavy | QVQLVQSGAEVKKPGASVKVSCKASGYTFTENIIHWVRQAPGQGLEWMGWIA | 839 |
| Chain | PGSGSIKYAQKLQGRVTMTTDTSTSTAYMELRSLRSDDTAVYYCARHGGTGR | |
| | GAMDYWGQGTLVTVSSASTKGPSVFPLAPSSKSTSGGTAALGCLVKDYFPEP | |
| | VTVSWNSGALTSGVHTFPAVLQSSGLYSLSSVVTVPSSSLGTQTYICNVNHK | |
| | PSNTKVDKKVEPKSCDKTHTCPPCPAPELLGGPSVFLFPPKPKDTLMISRTP | |
| | EVTCVVVDVSHEDPEVKFNWYVDGVEVHNAKTKPREEQYNSTYRVVSVLTVL | |
| | HQDWLNGKEYKCKVSNKALPAPIEKTISKAKGQPREPQVYTLPPSRDELTKN | |
| | QVSLTCLVKGFYPSDIAVEWESNGQPENNYKTTPPVLDSDGSFFLYSKLTVD | |
| | KSRWQQGNVFSCSVMHEALHNHYTQKSLSLSPGK | |
| Light | EIVLTQSPGTLSLSPGERATLSCRASQSVSTSAYSYMHWYQQKPGQAPRLLI | 840 |
| Chain | YLASNLESGIPDRFSGSGSGTDFTLTISRLEPEDFAVYYCQQSRELPYTFGQ | |
| | GTKLEIKRTVAAPSVFIFPPSDEQLKSGTASVVCLLNNFYPREAKVQWKVDN | |
| | ALQSGNSQESVTEQDSKDSTYSLSSTLTLSKADYEKHKVYACEVTHQGLSSP | |
| | VTKSFNRGEC | |

P24562158

| | | |
|---|---|---|
| Heavy | QVQLVQSGAEVKKPGASVKVSCKASGYTFTENIIHWVRQAPGQGLEWMGWIA | 841 |
| Chain | AGSGSIKYAQKLQGRVTMTTDTSTSTAYMELRSLRSDDTAVYYCARHGGTGR | |
| | GAMDYWGQGTLVTVSSASTKGPSVFPLAPSSKSTSGGTAALGCLVKDYFPEP | |
| | VTVSWNSGALTSGVHTFPAVLQSSGLYSLSSVVTVPSSSLGTQTYICNVNHK | |
| | PSNTKVDKKVEPKSCDKTHTCPPCPAPELLGGPSVFLFPPKPKDTLMISRTP | |
| | EVTCVVVDVSHEDPEVKFNWYVDGVEVHNAKTKPREEQYNSTYRVVSVLTVL | |
| | HQDWLNGKEYKCKVSNKALPAPIEKTISKAKGQPREPQVYTLPPSRDELTKN | |
| | QVSLTCLVKGFYPSDIAVEWESNGQPENNYKTTPPVLDSDGSFFLYSKLTVD | |
| | KSRWQQGNVFSCSVMHEALHNHYTQKSLSLSPGK | |
| Light | EIVLTQSPGTLSLSPGERATLSCRASQSVSTSAYSYMHWYQQKPGQAPRLLI | 842 |
| Chain | YLASNLESGIPDRFSGSGSGTDFTLTISRLEPEDFAVYYCQQSRELPYTFGQ | |
| | GTKLEIKRTVAAPSVFIFPPSDEQLKSGTASVVCLLNNFYPREAKVQWKVDN | |
| | ALQSGNSQESVTEQDSKDSTYSLSSTLTLSKADYEKHKVYACEVTHQGLSSP | |
| | VTKSFNRGEC | |

P24572158

| | | |
|---|---|---|
| Heavy | QVQLVQSGAEVKKPGASVKVSCKASGYTFTENIIHWVRQAPGQGLEWMGWIH | 843 |
| Chain | PASGSIKYAQKLQGRVTMTTDTSTSTAYMELRSLRSDDTAVYYCARHGGTGR | |
| | GAMDYWGQGTLVTVSSASTKGPSVFPLAPSSKSTSGGTAALGCLVKDYFPEP | |
| | VTVSWNSGALTSGVHTFPAVLQSSGLYSLSSVVTVPSSSLGTQTYICNVNHK | |
| | PSNTKVDKKVEPKSCDKTHTCPPCPAPELLGGPSVFLFPPKPKDTLMISRTP | |
| | EVTCVVVDVSHEDPEVKFNWYVDGVEVHNAKTKPREEQYNSTYRVVSVLTVL | |
| | HQDWLNGKEYKCKVSNKALPAPIEKTISKAKGQPREPQVYTLPPSRDELTKN | |
| | QVSLTCLVKGFYPSDIAVEWESNGQPENNYKTTPPVLDSDGSFFLYSKLTVD | |
| | KSRWQQGNVFSCSVMHEALHNHYTQKSLSLSPGK | |
| Light | EIVLTQSPGTLSLSPGERATLSCRASQSVSTSAYSYMHWYQQKPGQAPRLLI | 844 |
| Chain | YLASNLESGIPDRFSGSGSGTDFTLTISRLEPEDFAVYYCQQSRELPYTFGQ | |
| | GTKLEIKRTVAAPSVFIFPPSDEQLKSGTASVVCLLNNFYPREAKVQWKVDN | |
| | ALQSGNSQESVTEQDSKDSTYSLSSTLTLSKADYEKHKVYACEVTHQGLSSP | |
| | VTKSFNRGEC | |

P24582158

| | | |
|---|---|---|
| Heavy | QVQLVQSGAEVKKPGASVKVSCKASGYTFTENIIHWVRQAPGQGLEWMGWIH | 845 |
| Chain | PGAGSIKYAQKLQGRVTMTTDTSTSTAYMELRSLRSDDTAVYYCARHGGTGR | |
| | GAMDYWGQGTLVTVSSASTKGPSVFPLAPSSKSTSGGTAALGCLVKDYFPEP | |
| | VTVSWNSGALTSGVHTFPAVLQSSGLYSLSSVVTVPSSSLGTQTYICNVNHK | |
| | PSNTKVDKKVEPKSCDKTHTCPPCPAPELLGGPSVFLFPPKPKDTLMISRTP | |
| | EVTCVVVDVSHEDPEVKFNWYVDGVEVHNAKTKPREEQYNSTYRVVSVLTVL | |
| | HQDWLNGKEYKCKVSNKALPAPIEKTISKAKGQPREPQVYTLPPSRDELTKN | |
| | QVSLTCLVKGFYPSDIAVEWESNGQPENNYKTTPPVLDSDGSFFLYSKLTVD | |
| | KSRWQQGNVFSCSVMHEALHNHYTQKSLSLSPGK | |
| Light | EIVLTQSPGTLSLSPGERATLSCRASQSVSTSAYSYMHWYQQKPGQAPRLLI | 846 |
| Chain | YLASNLESGIPDRFSGSGSGTDFTLTISRLEPEDFAVYYCQQSRELPYTFGQ | |
| | GTKLEIKRTVAAPSVFIFPPSDEQLKSGTASVVCLLNNFYPREAKVQWKVDN | |
| | ALQSGNSQESVTEQDSKDSTYSLSSTLTLSKADYEKHKVYACEVTHQGLSSP | |
| | VTKSFNRGEC | |

P24592158

| | | |
|---|---|---|
| Heavy | QVQLVQSGAEVKKPGASVKVSCKASGYTFTENIIHWVRQAPGQGLEWMGWIH | 847 |
| Chain | PGSASIKYAQKLQGRVTMTTDTSTSTAYMELRSLRSDDTAVYYCARHGGTGR | |
| | GAMDYWGQGTLVTVSSASTKGPSVFPLAPSSKSTSGGTAALGCLVKDYFPEP | |
| | VTVSWNSGALTSGVHTFPAVLQSSGLYSLSSVVTVPSSSLGTQTYICNVNHK | |
| | PSNTKVDKKVEPKSCDKTHTCPPCPAPELLGGPSVFLFPPKPKDTLMISRTP | |
| | EVTCVVVDVSHEDPEVKFNWYVDGVEVHNAKTKPREEQYNSTYRVVSVLTVL | |
| | HQDWLNGKEYKCKVSNKALPAPIEKTISKAKGQPREPQVYTLPPSRDELTKN | |
| | QVSLTCLVKGFYPSDIAVEWESNGQPENNYKTTPPVLDSDGSFFLYSKLTVD | |
| | KSRWQQGNVFSCSVMHEALHNHYTQKSLSLSPGK | |
| Light | EIVLTQSPGTLSLSPGERATLSCRASQSVSTSAYSYMHWYQQKPGQAPRLLI | 848 |
| Chain | YLASNLESGIPDRFSGSGSGTDFTLTISRLEPEDFAVYYCQQSRELPYTFGQ | |
| | GTKLEIKRTVAAPSVFIFPPSDEQLKSGTASVVCLLNNFYPREAKVQWKVDN | |
| | ALQSGNSQESVTEQDSKDSTYSLSSTLTLSKADYEKHKVYACEVTHQGLSSP | |
| | VTKSFNRGEC | |

P24602158

| | | |
|---|---|---|
| Heavy | QVQLVQSGAEVKKPGASVKVSCKASGYTFTENIIHWVRQAPGQGLEWMGWIH | 849 |
| Chain | PGSGAIKYAQKLQGRVTMTTDTSTSTAYMELRSLRSDDTAVYYCARHGGTGR | |
| | GAMDYWGQGTLVTVSSASTKGPSVFPLAPSSKSTSGGTAALGCLVKDYFPEP | |
| | VTVSWNSGALTSGVHTFPAVLQSSGLYSLSSVVTVPSSSLGTQTYICNVNHK | |
| | PSNTKVDKKVEPKSCDKTHTCPPCPAPELLGGPSVFLFPPKPKDTLMISRTP | |
| | EVTCVVVDVSHEDPEVKFNWYVDGVEVHNAKTKPREEQYNSTYRVVSVLTVL | |
| | HQDWLNGKEYKCKVSNKALPAPIEKTISKAKGQPREPQVYTLPPSRDELTKN | |
| | QVSLTCLVKGFYPSDIAVEWESNGQPENNYKTTPPVLDSDGSFFLYSKLTVD | |
| | KSRWQQGNVFSCSVMHEALHNHYTQKSLSLSPGK | |
| Light | EIVLTQSPGTLSLSPGERATLSCRASQSVSTSAYSYMHWYQQKPGQAPRLLI | 850 |
| Chain | YLASNLESGIPDRFSGSGSGTDFTLTISRLEPEDFAVYYCQQSRELPYTFGQ | |
| | GTKLEIKRTVAAPSVFIFPPSDEQLKSGTASVVCLLNNFYPREAKVQWKVDN | |
| | ALQSGNSQESVTEQDSKDSTYSLSSTLTLSKADYEKHKVYACEVTHQGLSSP | |
| | VTKSFNRGEC | |

P24602537

| | | |
|---|---|---|
| Heavy | QVQLVQSGAEVKKPGASVKVSCKASGYTFTENIIHWVRQAPGQGLEWMGWIH | 851 |
| Chain | PGSGAIKYAQKLQGRVTMTTDTSTSTAYMELRSLRSDDTAVYYCARHGGTGR | |
| | GAMDYWGQGTLVTVSSASTKGPSVFPLAPSSKSTSGGTAALGCLVKDYFPEP | |
| | VTVSWNSGALTSGVHTFPAVLQSSGLYSLSSVVTVPSSSLGTQTYICNVNHK | |
| | PSNTKVDKKVEPKSCDKTHTCPPCPAPELLGGPSVFLFPPKPKDTLMISRTP | |
| | EVTCVVVDVSHEDPEVKFNWYVDGVEVHNAKTKPREEQYNSTYRVVSVLTVL | |
| | HQDWLNGKEYKCKVSNKALPAPIEKTISKAKGQPREPQVYTLPPSRDELTKN | |
| | QVSLTCLVKGFYPSDIAVEWESNGQPENNYKTTPPVLDSDGSFFLYSKLTVD | |
| | KSRWQQGNVFSCSVMHEALHNHYTQKSLSLSPGK | |
| Light | EIVLTQSPGTLSLSPGERATLSCRASQSVSTSAYSYMHWYQQKPGQAPRLLI | 852 |
| Chain | YAASNLESGIPDRFSGSGSGTDFTLTISRLEPEDFAVYYCQQSREAPYTFGQ | |
| | GTKLEIKRTVAAPSVFIFPPSDEQLKSGTASVVCLLNNFYPREAKVQWKVDN | |
| | ALQSGNSQESVTEQDSKDSTYSLSSTLTLSKADYEKHKVYACEVTHQGLSSP | |
| | VTKSFNRGEC | |

P24602538

| | | |
|---|---|---|
| Heavy | QVQLVQSGAEVKKPGASVKVSCKASGYTFTENIIHWVRQAPGQGLEWMGWIH | 853 |
| Chain | PGSGAIKYAQKLQGRVTMTTDTSTSTAYMELRSLRSDDTAVYYCARHGGTGR | |
| | GAMDYWGQGTLVTVSSASTKGPSVFPLAPSSKSTSGGTAALGCLVKDYFPEP | |
| | VTVSWNSGALTSGVHTFPAVLQSSGLYSLSSVVTVPSSSLGTQTYICNVNHK | |
| | PSNTKVDKKVEPKSCDKTHTCPPCPAPELLGGPSVFLFPPKPKDTLMISRTP | |
| | EVTCVVVDVSHEDPEVKFNWYVDGVEVHNAKTKPREEQYNSTYRVVSVLTVL | |
| | HQDWLNGKEYKCKVSNKALPAPIEKTISKAKGQPREPQVYTLPPSRDELTKN | |
| | QVSLTCLVKGFYPSDIAVEWESNGQPENNYKTTPPVLDSDGSFFLYSKLTVD | |
| | KSRWQQGNVFSCSVMHEALHNHYTQKSLSLSPGK | |
| Light | EIVLTQSPGTLSLSPGERATLSCRASQSVSTSAYSYMHWYQQKPGQAPRLLI | 854 |
| Chain | YGASNLESGIPDRFSGSGSGTDFTLTISRLEPEDFAVYYCQQSREAPYTFGQ | |
| | GTKLEIKRTVAAPSVFIFPPSDEQLKSGTASVVCLLNNFYPREAKVQWKVDN | |
| | ALQSGNSQESVTEQDSKDSTYSLSSTLTLSKADYEKHKVYACEVTHQGLSSP | |
| | VTKSFNRGEC | |

P24602539

| | | |
|---|---|---|
| Heavy | QVQLVQSGAEVKKPGASVKVSCKASGYTFTENIIHWVRQAPGQGLEWMGWIH | 855 |
| Chain | PGSGAIKYAQKLQGRVTMTTDTSTSTAYMELRSLRSDDTAVYYCARHGGTGR | |
| | GAMDYWGQGTLVTVSSASTKGPSVFPLAPSSKSTSGGTAALGCLVKDYFPEP | |
| | VTVSWNSGALTSGVHTFPAVLQSSGLYSLSSVVTVPSSSLGTQTYICNVNHK | |
| | PSNTKVDKKVEPKSCDKTHTCPPCPAPELLGGPSVFLFPPKPKDTLMISRTP | |
| | EVTCVVVDVSHEDPEVKFNWYVDGVEVHNAKTKPREEQYNSTYRVVSVLTVL | |
| | HQDWLNGKEYKCKVSNKALPAPIEKTISKAKGQPREPQVYTLPPSRDELTKN | |
| | QVSLTCLVKGFYPSDIAVEWESNGQPENNYKTTPPVLDSDGSFFLYSKLTVD | |
| | KSRWQQGNVFSCSVMHEALHNHYTQKSLSLSPGK | |
| Light | EIVLTQSPGTLSLSPGERATLSCRASQSVSTSAYSYMHWYQQKPGQAPRLLI | 856 |
| Chain | YGASNLESGIPDRFSGSGSGTDFTLTISRLEPEDFAVYYCQQSREYPYTFGQ | |
| | GTKLEIKRTVAAPSVFIFPPSDEQLKSGTASVVCLLNNFYPREAKVQWKVDN | |
| | ALQSGNSQESVTEQDSKDSTYSLSSTLTLSKADYEKHKVYACEVTHQGLSSP | |
| | VTKSFNRGEC | |

P24612158

| | | |
|---|---|---|
| Heavy | QVQLVQSGAEVKKPGASVKVSCKASGYTFTENIIHWVRQAPGQGLEWMGWIH | 857 |
| Chain | PGSASIKYAQKLQGRVTMTTDTSTSTAYMELRSLRSDDTAVYYCARHGGTGR | |
| | GAMDYWGQGTLVTVSSASTKGPSVFPLAPSSKSTSGGTAALGCLVKDYFPEP | |
| | VTVSWNSGALTSGVHTFPAVLQSSGLYSLSSVVTVPSSSLGTQTYICNVNHK | |
| | PSNTKVDKKVEPKSCDKTHTCPPCPAPELLGGPSVFLFPPKPKDTLMISRTP | |
| | EVTCVVVDVSHEDPEVKFNWYVDGVEVHNAKTKPREEQYNSTYRVVSVLTVL | |
| | HQDWLNGKEYKCKVSNKALPAPIEKTISKAKGQPREPQVYTLPPSRDELTKN | |
| | QVSLTCLVKGFYPSDIAVEWESNGQPENNYKTTPPVLDSDGSFFLYSKLTVD | |
| | KSRWQQGNVFSCSVMHEALHNHYTQKSLSLSPGK | |
| Light | EIVLTQSPGTLSLSPGERATLSCRASQSVSTSAYSYMHWYQQKPGQAPRLLI | 858 |
| Chain | YLASNLESGIPDRFSGSGSGTDFTLTISRLEPEDFAVYYCQQSRELPYTFGQ | |
| | GTKLEIKRTVAAPSVFIFPPSDEQLKSGTASVVCLLNNFYPREAKVQWKVDN | |
| | ALQSGNSQESVTEQDSKDSTYSLSSTLTLSKADYEKHKVYACEVTHQGLSSP | |
| | VTKSFNRGEC | |

P24622158

| | | |
|---|---|---|
| Heavy | QVQLVQSGAEVKKPGASVKVSCKASGYTFTENIIHWVRQAPGQGLEWMGWIH | 859 |
| Chain | PGSGSIAYAQKLQGRVTMTTDTSTSTAYMELRSLRSDDTAVYYCARHGGTGR | |
| | GAMDYWGQGTLVTVSSASTKGPSVFPLAPSSKSTSGGTAALGCLVKDYFPEP | |
| | VTVSWNSGALTSGVHTFPAVLQSSGLYSLSSVVTVPSSSLGTQTYICNVNHK | |
| | PSNTKVDKKVEPKSCDKTHTCPPCPAPELLGGPSVFLFPPKPKDTLMISRTP | |
| | EVTCVVVDVSHEDPEVKFNWYVDGVEVHNAKTKPREEQYNSTYRVVSVLTVL | |
| | HQDWLNGKEYKCKVSNKALPAPIEKTISKAKGQPREPQVYTLPPSRDELTKN | |
| | QVSLTCLVKGFYPSDIAVEWESNGQPENNYKTTPPVLDSDGSFFLYSKLTVD | |
| | KSRWQQGNVFSCSVMHEALHNHYTQKSLSLSPGK | |
| Light | EIVLTQSPGTLSLSPGERATLSCRASQSVSTSAYSYMHWYQQKPGQAPRLLI | 860 |
| Chain | YLASNLESGIPDRFSGSGSGTDFTLTISRLEPEDFAVYYCQQSRELPYTFGQ | |
| | GTKLEIKRTVAAPSVFIFPPSDEQLKSGTASVVCLLNNFYPREAKVQWKVDN | |
| | ALQSGNSQESVTEQDSKDSTYSLSSTLTLSKADYEKHKVYACEVTHQGLSSP | |
| | VTKSFNRGEC | |

P24632158

| | | |
|---|---|---|
| Heavy | QVQLVQSGAEVKKPGASVKVSCKASGYTFTENIIHWVRQAPGQGLEWMGWIH | 861 |
| Chain | PGSGSIKYAQKLQGRVTMTTDTSTSTAYMELRSLRSDDTAVYYCARAGGTGR | |
| | GAMDYWGQGTLVTVSSASTKGPSVFPLAPSSKSTSGGTAALGCLVKDYFPEP | |
| | VTVSWNSGALTSGVHTFPAVLQSSGLYSLSSVVTVPSSSLGTQTYICNVNHK | |
| | PSNTKVDKKVEPKSCDKTHTCPPCPAPELLGGPSVFLFPPKPKDTLMISRTP | |
| | EVTCVVVDVSHEDPEVKFNWYVDGVEVHNAKTKPREEQYNSTYRVVSVLTVL | |
| | HQDWLNGKEYKCKVSNKALPAPIEKTISKAKGQPREPQVYTLPPSRDELTKN | |
| | QVSLTCLVKGFYPSDIAVEWESNGQPENNYKTTPPVLDSDGSFFLYSKLTVD | |
| | KSRWQQGNVFSCSVMHEALHNHYTQKSLSLSPGK | |
| Light | EIVLTQSPGTLSLSPGERATLSCRASQSVSTSAYSYMHWYQQKPGQAPRLLI | 862 |
| Chain | YLASNLESGIPDRFSGSGSGTDFTLTISRLEPEDFAVYYCQQSRELPYTFGQ | |
| | GTKLEIKRTVAAPSVFIFPPSDEQLKSGTASVVCLLNNFYPREAKVQWKVDN | |
| | ALQSGNSQESVTEQDSKDSTYSLSSTLTLSKADYEKHKVYACEVTHQGLSSP | |
| | VTKSFNRGEC | |

P24642158

| | | |
|---|---|---|
| Heavy | QVQLVQSGAEVKKPGASVKVSCKASGYTFTENIIHWVRQAPGQGLEWMGWIH | 863 |
| Chain | PGSGSIKYAQKLQGRVTMTTDTSTSTAYMELRSLRSDDTAVYYCARHAGTGR | |
| | GAMDYWGQGTLVTVSSASTKGPSVFPLAPSSKSTSGGTAALGCLVKDYFPEP | |
| | VTVSWNSGALTSGVHTFPAVLQSSGLYSLSSVVTVPSSSLGTQTYICNVNHK | |
| | PSNTKVDKKVEPKSCDKTHTCPPCPAPELLGGPSVFLFPPKPKDTLMISRTP | |
| | EVTCVVVDVSHEDPEVKFNWYVDGVEVHNAKTKPREEQYNSTYRVVSVLTVL | |
| | HQDWLNGKEYKCKVSNKALPAPIEKTISKAKGQPREPQVYTLPPSRDELTKN | |
| | QVSLTCLVKGFYPSDIAVEWESNGQPENNYKTTPPVLDSDGSFFLYSKLTVD | |
| | KSRWQQGNVFSCSVMHEALHNHYTQKSLSLSPGK | |
| Light | EIVLTQSPGTLSLSPGERATLSCRASQSVSTSAYSYMHWYQQKPGQAPRLLI | 864 |
| Chain | YLASNLESGIPDRFSGSGSGTDFTLTISRLEPEDFAVYYCQQSRELPYTFGQ | |
| | GTKLEIKRTVAAPSVFIFPPSDEQLKSGTASVVCLLNNFYPREAKVQWKVDN | |
| | ALQSGNSQESVTEQDSKDSTYSLSSTLTLSKADYEKHKVYACEVTHQGLSSP | |
| | VTKSFNRGEC | |

P24652158

| | | |
|---|---|---|
| Heavy | QVQLVQSGAEVKKPGASVKVSCKASGYTFTENIIHWVRQAPGQGLEWMGWIH | 865 |
| Chain | PGSGSIKYAQKLQGRVTMTTDTSTSTAYMELRSLRSDDTAVYYCARHGATGR | |
| | GAMDYWGQGTLVTVSSASTKGPSVFPLAPSSKSTSGGTAALGCLVKDYFPEP | |
| | VTVSWNSGALTSGVHTFPAVLQSSGLYSLSSVVTVPSSSLGTQTYICNVNHK | |
| | PSNTKVDKKVEPKSCDKTHTCPPCPAPELLGGPSVFLFPPKPKDTLMISRTP | |
| | EVTCVVVDVSHEDPEVKFNWYVDGVEVHNAKTKPREEQYNSTYRVVSVLTVL | |
| | HQDWLNGKEYKCKVSNKALPAPIEKTISKAKGQPREPQVYTLPPSRDELTKN | |
| | QVSLTCLVKGFYPSDIAVEWESNGQPENNYKTTPPVLDSDGSFFLYSKLTVD | |
| | KSRWQQGNVFSCSVMHEALHNHYTQKSLSLSPGK | |
| Light | EIVLTQSPGTLSLSPGERATLSCRASQSVSTSAYSYMHWYQQKPGQAPRLLI | 866 |
| Chain | YLASNLESGIPDRFSGSGSGTDFTLTISRLEPEDFAVYYCQQSRELPYTFGQ | |
| | GTKLEIKRTVAAPSVFIFPPSDEQLKSGTASVVCLLNNFYPREAKVQWKVDN | |
| | ALQSGNSQESVTEQDSKDSTYSLSSTLTLSKADYEKHKVYACEVTHQGLSSP | |
| | VTKSFNRGEC | |

P24662158

| | | |
|---|---|---|
| Heavy | QVQLVQSGAEVKKPGASVKVSCKASGYTFTENIIHWVRQAPGQGLEWMGWIH | 867 |
| Chain | PGSGSIKYAQKLQGRVTMTTDTSTSTAYMELRSLRSDDTAVYYCARHGGAGR | |
| | GAMDYWGQGTLVTVSSASTKGPSVFPLAPSSKSTSGGTAALGCLVKDYFPEP | |
| | VTVSWNSGALTSGVHTFPAVLQSSGLYSLSSVVTVPSSSLGTQTYICNVNHK | |
| | PSNTKVDKKVEPKSCDKTHTCPPCPAPELLGGPSVFLFPPKPKDTLMISRTP | |
| | EVTCVVVDVSHEDPEVKFNWYVDGVEVHNAKTKPREEQYNSTYRVVSVLTVL | |
| | HQDWLNGKEYKCKVSNKALPAPIEKTISKAKGQPREPQVYTLPPSRDELTKN | |
| | QVSLTCLVKGFYPSDIAVEWESNGQPENNYKTTPPVLDSDGSFFLYSKLTVD | |
| | KSRWQQGNVFSCSVMHEALHNHYTQKSLSLSPGK | |
| Light | EIVLTQSPGTLSLSPGERATLSCRASQSVSTSAYSYMHWYQQKPGQAPRLLI | 868 |
| Chain | YLASNLESGIPDRFSGSGSGTDFTLTISRLEPEDFAVYYCQQSRELPYTFGQ | |
| | GTKLEIKRTVAAPSVFIFPPSDEQLKSGTASVVCLLNNFYPREAKVQWKVDN | |
| | ALQSGNSQESVTEQDSKDSTYSLSSTLTLSKADYEKHKVYACEVTHQGLSSP | |
| | VTKSFNRGEC | |

P24672158

| | | |
|---|---|---|
| Heavy | QVQLVQSGAEVKKPGASVKVSCKASGYTFTENIIHWVRQAPGQGLEWMGWIH | 869 |
| Chain | PGSGSIKYAQKLQGRVTMTTDTSTSTAYMELRSLRSDDTAVYYCARHGGTAR | |
| | GAMDYWGQGTLVTVSSASTKGPSVFPLAPSSKSTSGGTAALGCLVKDYFPEP | |
| | VTVSWNSGALTSGVHTFPAVLQSSGLYSLSSVVTVPSSSLGTQTYICNVNHK | |
| | PSNTKVDKKVEPKSCDKTHTCPPCPAPELLGGPSVFLFPPKPKDTLMISRTP | |
| | EVTCVVVDVSHEDPEVKFNWYVDGVEVHNAKTKPREEQYNSTYRVVSVLTVL | |
| | HQDWLNGKEYKCKVSNKALPAPIEKTISKAKGQPREPQVYTLPPSRDELTKN | |
| | QVSLTCLVKGFYPSDIAVEWESNGQPENNYKTTPPVLDSDGSFFLYSKLTVD | |
| | KSRWQQGNVFSCSVMHEALHNHYTQKSLSLSPGK | |
| Light | EIVLTQSPGTLSLSPGERATLSCRASQSVSTSAYSYMHWYQQKPGQAPRLLI | 870 |
| Chain | YLASNLESGIPDRFSGSGSGTDFTLTISRLEPEDFAVYYCQQSRELPYTFGQ | |
| | GTKLEIKRTVAAPSVFIFPPSDEQLKSGTASVVCLLNNFYPREAKVQWKVDN | |
| | ALQSGNSQESVTEQDSKDSTYSLSSTLTLSKADYEKHKVYACEVTHQGLSSP | |
| | VTKSFNRGEC | |

P24682158

| | | |
|---|---|---|
| Heavy | QVQLVQSGAEVKKPGASVKVSCKASGYTFTENIIHWVRQAPGQGLEWMGWIH | 871 |
| Chain | PGSGSIKYAQKLQGRVTMTTDTSTSTAYMELRSLRSDDTAVYYCARHGGTGA | |
| | GAMDYWGQGTLVTVSSASTKGPSVFPLAPSSKSTSGGTAALGCLVKDYFPEP | |
| | VTVSWNSGALTSGVHTFPAVLQSSGLYSLSSVVTVPSSSLGTQTYICNVNHK | |
| | PSNTKVDKKVEPKSCDKTHTCPPCPAPELLGGPSVFLFPPKPKDTLMISRTP | |
| | EVTCVVVDVSHEDPEVKFNWYVDGVEVHNAKTKPREEQYNSTYRVVSVLTVL | |
| | HQDWLNGKEYKCKVSNKALPAPIEKTISKAKGQPREPQVYTLPPSRDELTKN | |
| | QVSLTCLVKGFYPSDIAVEWESNGQPENNYKTTPPVLDSDGSFFLYSKLTVD | |
| | KSRWQQGNVFSCSVMHEALHNHYTQKSLSLSPGK | |
| Light | EIVLTQSPGTLSLSPGERATLSCRASQSVSTSAYSYMHWYQQKPGQAPRLLI | 872 |
| Chain | YLASNLESGIPDRFSGSGSGTDFTLTISRLEPEDFAVYYCQQSRELPYTFGQ | |
| | GTKLEIKRTVAAPSVFIFPPSDEQLKSGTASVVCLLNNFYPREAKVQWKVDN | |
| | ALQSGNSQESVTEQDSKDSTYSLSSTLTLSKADYEKHKVYACEVTHQGLSSP | |
| | VTKSFNRGEC | |

P24692158

| | | |
|---|---|---|
| Heavy | QVQLVQSGAEVKKPGASVKVSCKASGYTFTENIIHWVRQAPGQGLEWMGWIH | 873 |
| Chain | PGSGSIKYAQKLQGRVTMTTDTSTSTAYMELRSLRSDDTAVYYCARHGGTGR | |
| | AAMDYWGQGTLVTVSSASTKGPSVFPLAPSSKSTSGGTAALGCLVKDYFPEP | |
| | VTVSWNSGALTSGVHTFPAVLQSSGLYSLSSVVTVPSSSLGTQTYICNVNHK | |
| | PSNTKVDKKVEPKSCDKTHTCPPCPAPELLGGPSVFLFPPKPKDTLMISRTP | |
| | EVTCVVVDVSHEDPEVKFNWYVDGVEVHNAKTKPREEQYNSTYRVVSVLTVL | |
| | HQDWLNGKEYKCKVSNKALPAPIEKTISKAKGQPREPQVYTLPPSRDELTKN | |
| | QVSLTCLVKGFYPSDIAVEWESNGQPENNYKTTPPVLDSDGSFFLYSKLTVD | |
| | KSRWQQGNVFSCSVMHEALHNHYTQKSLSLSPGK | |
| Light | EIVLTQSPGTLSLSPGERATLSCRASQSVSTSAYSYMHWYQQKPGQAPRLLI | 874 |
| Chain | YLASNLESGIPDRFSGSGSGTDFTLTISRLEPEDFAVYYCQQSRELPYTFGQ | |
| | GTKLEIKRTVAAPSVFIFPPSDEQLKSGTASVVCLLNNFYPREAKVQWKVDN | |
| | ALQSGNSQESVTEQDSKDSTYSLSSTLTLSKADYEKHKVYACEVTHQGLSSP | |
| | VTKSFNRGEC | |

P25352158

| | | |
|---|---|---|
| Heavy | QVQLVQSGAEVKKPGASVKVSCKASGYTFTANIIHWVRQAPGQGLEWMGWIH | 875 |
| Chain | PGSGAIKYAQKLQGRVTMTTDTSTSTAYMELRSLRSDDTAVYYCARHGGTGR | |
| | GAMDYWGQGTLVTVSSASTKGPSVFPLAPSSKSTSGGTAALGCLVKDYFPEP | |
| | VTVSWNSGALTSGVHTFPAVLQSSGLYSLSSVVTVPSSSLGTQTYICNVNHK | |
| | PSNTKVDKKVEPKSCDKTHTCPPCPAPELLGGPSVFLFPPKPKDTLMISRTP | |
| | EVTCVVVDVSHEDPEVKFNWYVDGVEVHNAKTKPREEQYNSTYRVVSVLTVL | |
| | HQDWLNGKEYKCKVSNKALPAPIEKTISKAKGQPREPQVYTLPPSRDELTKN | |
| | QVSLTCLVKGFYPSDIAVEWESNGQPENNYKTTPPVLDSDGSFFLYSKLTVD | |
| | KSRWQQGNVFSCSVMHEALHNHYTQKSLSLSPGK | |
| Light | EIVLTQSPGTLSLSPGERATLSCRASQSVSTSAYSYMHWYQQKPGQAPRLLI | 876 |
| Chain | YLASNLESGIPDRFSGSGSGTDFTLTISRLEPEDFAVYYCQQSRELPYTFGQ | |
| | GTKLEIKRTVAAPSVFIFPPSDEQLKSGTASVVCLLNNFYPREAKVQWKVDN | |
| | ALQSGNSQESVTEQDSKDSTYSLSSTLTLSKADYEKHKVYACEVTHQGLSSP | |
| | VTKSFNRGEC | |

P25352476

| | | |
|---|---|---|
| Heavy | QVQLVQSGAEVKKPGASVKVSCKASGYTFTANIIHWVRQAPGQGLEWMGWIH | 877 |
| Chain | PGSGAIKYAQKLQGRVTMTTDTSTSTAYMELRSLRSDDTAVYYCARHGGTGR | |
| | GAMDYWGQGTLVTVSSASTKGPSVFPLAPSSKSTSGGTAALGCLVKDYFPEP | |
| | VTVSWNSGALTSGVHTFPAVLQSSGLYSLSSVVTVPSSSLGTQTYICNVNHK | |
| | PSNTKVDKKVEPKSCDKTHTCPPCPAPELLGGPSVFLFPPKPKDTLMISRTP | |
| | EVTCVVVDVSHEDPEVKFNWYVDGVEVHNAKTKPREEQYNSTYRVVSVLTVL | |
| | HQDWLNGKEYKCKVSNKALPAPIEKTISKAKGQPREPQVYTLPPSRDELTKN | |
| | QVSLTCLVKGFYPSDIAVEWESNGQPENNYKTTPPVLDSDGSFFLYSKLTVD | |
| | KSRWQQGNVFSCSVMHEALHNHYTQKSLSLSPGK | |
| Light | EIVLTQSPGTLSLSPGERATLSCRASQSVSTSAYSYMHWYQQKPGQAPRLLI | 878 |
| Chain | YAASNLESGIPDRFSGSGSGTDFTLTISRLEPEDFAVYYCQQSRELPYTFGQ | |
| | GTKLEIKRTVAAPSVFIFPPSDEQLKSGTASVVCLLNNFYPREAKVQWKVDN | |
| | ALQSGNSQESVTEQDSKDSTYSLSSTLTLSKADYEKHKVYACEVTHQGLSSP | |
| | VTKSFNRGEC | |

P25352485

| | | |
|---|---|---|
| Heavy | QVQLVQSGAEVKKPGASVKVSCKASGYTFTANIIHWVRQAPGQGLEWMGWIH | 879 |
| Chain | PGSGAIKYAQKLQGRVTMTTDTSTSTAYMELRSLRSDDTAVYYCARHGGTGR | |
| | GAMDYWGQGTLVTVSSASTKGPSVFPLAPSSKSTSGGTAALGCLVKDYFPEP | |
| | VTVSWNSGALTSGVHTFPAVLQSSGLYSLSSVVTVPSSSLGTQTYICNVNHK | |
| | PSNTKVDKKVEPKSCDKTHTCPPCPAPELLGGPSVFLFPPKPKDTLMISRTP | |
| | EVTCVVVDVSHEDPEVKFNWYVDGVEVHNAKTKPREEQYNSTYRVVSVLTVL | |
| | HQDWLNGKEYKCKVSNKALPAPIEKTISKAKGQPREPQVYTLPPSRDELTKN | |
| | QVSLTCLVKGFYPSDIAVEWESNGQPENNYKTTPPVLDSDGSFFLYSKLTVD | |
| | KSRWQQGNVFSCSVMHEALHNHYTQKSLSLSPGK | |
| Light | EIVLTQSPGTLSLSPGERATLSCRASQSVSTSAYSYMHWYQQKPGQAPRLLI | 880 |
| Chain | YLASNLESGIPDRFSGSGSGTDFTLTISRLEPEDFAVYYCQQSREAPYTFGQ | |
| | GTKLEIKRTVAAPSVFIFPPSDEQLKSGTASVVCLLNNFYPREAKVQWKVDN | |
| | ALQSGNSQESVTEQDSKDSTYSLSSTLTLSKADYEKHKVYACEVTHQGLSSP | |
| | VTKSFNRGEC | |

P25352537

| | | |
|---|---|---|
| Heavy | QVQLVQSGAEVKKPGASVKVSCKASGYTFTANIIHWVRQAPGQGLEWMGWIH | 881 |
| Chain | PGSGAIKYAQKLQGRVTMTTDTSTSTAYMELRSLRSDDTAVYYCARHGGTGR | |
| | GAMDYWGQGTLVTVSSASTKGPSVFPLAPSSKSTSGGTAALGCLVKDYFPEP | |
| | VTVSWNSGALTSGVHTFPAVLQSSGLYSLSSVVTVPSSSLGTQTYICNVNHK | |
| | PSNTKVDKKVEPKSCDKTHTCPPCPAPELLGGPSVFLFPPKPKDTLMISRTP | |
| | EVTCVVVDVSHEDPEVKFNWYVDGVEVHNAKTKPREEQYNSTYRVVSVLTVL | |
| | HQDWLNGKEYKCKVSNKALPAPIEKTISKAKGQPREPQVYTLPPSRDELTKN | |
| | QVSLTCLVKGFYPSDIAVEWESNGQPENNYKTTPPVLDSDGSFFLYSKLTVD | |
| | KSRWQQGNVFSCSVMHEALHNHYTQKSLSLSPGK | |
| Light | EIVLTQSPGTLSLSPGERATLSCRASQSVSTSAYSYMHWYQQKPGQAPRLLI | 882 |
| Chain | YAASNLESGIPDRFSGSGSGTDFTLTISRLEPEDFAVYYCQQSREAPYTFGQ | |
| | GTKLEIKRTVAAPSVFIFPPSDEQLKSGTASVVCLLNNFYPREAKVQWKVDN | |
| | ALQSGNSQESVTEQDSKDSTYSLSSTLTLSKADYEKHKVYACEVTHQGLSSP | |
| | VTKSFNRGEC | |

P25352538

| | | |
|---|---|---|
| Heavy | QVQLVQSGAEVKKPGASVKVSCKASGYTFTANIIHWVRQAPGQGLEWMGWIH | 883 |
| Chain | PGSGAIKYAQKLQGRVTMTTDTSTSTAYMELRSLRSDDTAVYYCARHGGTGR | |
| | GAMDYWGQGTLVTVSSASTKGPSVFPLAPSSKSTSGGTAALGCLVKDYFPEP | |
| | VTVSWNSGALTSGVHTFPAVLQSSGLYSLSSVVTVPSSSLGTQTYICNVNHK | |
| | PSNTKVDKKVEPKSCDKTHTCPPCPAPELLGGPSVFLFPPKPKDTLMISRTP | |
| | EVTCVVVDVSHEDPEVKFNWYVDGVEVHNAKTKPREEQYNSTYRVVSVLTVL | |
| | HQDWLNGKEYKCKVSNKALPAPIEKTISKAKGQPREPQVYTLPPSRDELTKN | |
| | QVSLTCLVKGFYPSDIAVEWESNGQPENNYKTTPPVLDSDGSFFLYSKLTVD | |
| | KSRWQQGNVFSCSVMHEALHNHYTQKSLSLSPGK | |
| Light | EIVLTQSPGTLSLSPGERATLSCRASQSVSTSAYSYMHWYQQKPGQAPRLLI | 884 |
| Chain | YGASNLESGIPDRFSGSGSGTDFTLTISRLEPEDFAVYYCQQSREAPYTFGQ | |
| | GTKLEIKRTVAAPSVFIFPPSDEQLKSGTASVVCLLNNFYPREAKVQWKVDN | |
| | ALQSGNSQESVTEQDSKDSTYSLSSTLTLSKADYEKHKVYACEVTHQGLSSP | |
| | VTKSFNRGEC | |

P25352539

| | | |
|---|---|---|
| Heavy | QVQLVQSGAEVKKPGASVKVSCKASGYTFTANIIHWVRQAPGQGLEWMGWIH | 885 |
| Chain | PGSGAIKYAQKLQGRVTMTTDTSTSTAYMELRSLRSDDTAVYYCARHGGTGR | |
| | GAMDYWGQGTLVTVSSASTKGPSVFPLAPSSKSTSGGTAALGCLVKDYFPEP | |
| | VTVSWNSGALTSGVHTFPAVLQSSGLYSLSSVVTVPSSSLGTQTYICNVNHK | |
| | PSNTKVDKKVEPKSCDKTHTCPPCPAPELLGGPSVFLFPPKPKDTLMISRTP | |
| | EVTCVVVDVSHEDPEVKFNWYVDGVEVHNAKTKPREEQYNSTYRVVSVLTVL | |
| | HQDWLNGKEYKCKVSNKALPAPIEKTISKAKGQPREPQVYTLPPSRDELTKN | |
| | QVSLTCLVKGFYPSDIAVEWESNGQPENNYKTTPPVLDSDGSFFLYSKLTVD | |
| | KSRWQQGNVFSCSVMHEALHNHYTQKSLSLSPGK | |
| Light | EIVLTQSPGTLSLSPGERATLSCRASQSVSTSAYSYMHWYQQKPGQAPRLLI | 886 |
| Chain | YGASNLESGIPDRFSGSGSGTDFTLTISRLEPEDFAVYYCQQSREYPYTFGQ | |
| | GTKLEIKRTVAAPSVFIFPPSDEQLKSGTASVVCLLNNFYPREAKVQWKVDN | |
| | ALQSGNSQESVTEQDSKDSTYSLSSTLTLSKADYEKHKVYACEVTHQGLSSP | |
| | VTKSFNRGEC | |

P25362158

| | | |
|---|---|---|
| Heavy | QVQLVQSGAEVKKPGASVKVSCKASGYTFTSNIIHWVRQAPGQGLEWMGWIH | 887 |
| Chain | PGSGAIKYAQKLQGRVTMTTDTSTSTAYMELRSLRSDDTAVYYCARHGGTGR | |
| | GAMDYWGQGTLVTVSSASTKGPSVFPLAPSSKSTSGGTAALGCLVKDYFPEP | |
| | VTVSWNSGALTSGVHTFPAVLQSSGLYSLSSVVTVPSSSLGTQTYICNVNHK | |
| | PSNTKVDKKVEPKSCDKTHTCPPCPAPELLGGPSVFLFPPKPKDTLMISRTP | |
| | EVTCVVVDVSHEDPEVKFNWYVDGVEVHNAKTKPREEQYNSTYRVVSVLTVL | |
| | HQDWLNGKEYKCKVSNKALPAPIEKTISKAKGQPREPQVYTLPPSRDELTKN | |
| | QVSLTCLVKGFYPSDIAVEWESNGQPENNYKTTPPVLDSDGSFFLYSKLTVD | |
| | KSRWQQGNVFSCSVMHEALHNHYTQKSLSLSPGK | |
| Light | EIVLTQSPGTLSLSPGERATLSCRASQSVSTSAYSYMHWYQQKPGQAPRLLI | 888 |
| Chain | YLASNLESGIPDRFSGSGSGTDFTLTISRLEPEDFAVYYCQQSRELPYTFGQ | |
| | GTKLEIKRTVAAPSVFIFPPSDEQLKSGTASVVCLLNNFYPREAKVQWKVDN | |
| | ALQSGNSQESVTEQDSKDSTYSLSSTLTLSKADYEKHKVYACEVTHQGLSSP | |
| | VTKSFNRGEC | |

P25362476

| | | |
|---|---|---|
| Heavy | QVQLVQSGAEVKKPGASVKVSCKASGYTFTSNIIHWVRQAPGQGLEWMGWIH | 889 |
| Chain | PGSGAIKYAQKLQGRVTMTTDTSTSTAYMELRSLRSDDTAVYYCARHGGTGR | |
| | GAMDYWGQGTLVTVSSASTKGPSVFPLAPSSKSTSGGTAALGCLVKDYFPEP | |
| | VTVSWNSGALTSGVHTFPAVLQSSGLYSLSSVVTVPSSSLGTQTYICNVNHK | |
| | PSNTKVDKKVEPKSCDKTHTCPPCPAPELLGGPSVFLFPPKPKDTLMISRTP | |
| | EVTCVVVDVSHEDPEVKFNWYVDGVEVHNAKTKPREEQYNSTYRVVSVLTVL | |
| | HQDWLNGKEYKCKVSNKALPAPIEKTISKAKGQPREPQVYTLPPSRDELTKN | |
| | QVSLTCLVKGFYPSDIAVEWESNGQPENNYKTTPPVLDSDGSFFLYSKLTVD | |
| | KSRWQQGNVFSCSVMHEALHNHYTQKSLSLSPGK | |
| Light | EIVLTQSPGTLSLSPGERATLSCRASQSVSTSAYSYMHWYQQKPGQAPRLLI | 890 |
| Chain | YAASNLESGIPDRFSGSGSGTDFTLTISRLEPEDFAVYYCQQSRELPYTFGQ | |
| | GTKLEIKRTVAAPSVFIFPPSDEQLKSGTASVVCLLNNFYPREAKVQWKVDN | |
| | ALQSGNSQESVTEQDSKDSTYSLSSTLTLSKADYEKHKVYACEVTHQGLSSP | |
| | VTKSFNRGEC | |

P25362485

| | | |
|---|---|---|
| Heavy | QVQLVQSGAEVKKPGASVKVSCKASGYTFTSNIIHWVRQAPGQGLEWMGWIH | 891 |
| Chain | PGSGAIKYAQKLQGRVTMTTDTSTSTAYMELRSLRSDDTAVYYCARHGGTGR | |
| | GAMDYWGQGTLVTVSSASTKGPSVFPLAPSSKSTSGGTAALGCLVKDYFPEP | |
| | VTVSWNSGALTSGVHTFPAVLQSSGLYSLSSVVTVPSSSLGTQTYICNVNHK | |
| | PSNTKVDKKVEPKSCDKTHTCPPCPAPELLGGPSVFLFPPKPKDTLMISRTP | |
| | EVTCVVVDVSHEDPEVKFNWYVDGVEVHNAKTKPREEQYNSTYRVVSVLTVL | |
| | HQDWLNGKEYKCKVSNKALPAPIEKTISKAKGQPREPQVYTLPPSRDELTKN | |
| | QVSLTCLVKGFYPSDIAVEWESNGQPENNYKTTPPVLDSDGSFFLYSKLTVD | |
| | KSRWQQGNVFSCSVMHEALHNHYTQKSLSLSPGK | |
| Light | EIVLTQSPGTLSLSPGERATLSCRASQSVSTSAYSYMHWYQQKPGQAPRLLI | 892 |
| Chain | YLASNLESGIPDRFSGSGSGTDFTLTISRLEPEDFAVYYCQQSREAPYTFGQ | |
| | GTKLEIKRTVAAPSVFIFPPSDEQLKSGTASVVCLLNNFYPREAKVQWKVDN | |
| | ALQSGNSQESVTEQDSKDSTYSLSSTLTLSKADYEKHKVYACEVTHQGLSSP | |
| | VTKSFNRGEC | |

P25362537

| | | |
|---|---|---|
| Heavy | QVQLVQSGAEVKKPGASVKVSCKASGYTFTSNIIHWVRQAPGQGLEWMGWIH | 893 |
| Chain | PGSGAIKYAQKLQGRVTMTTDTSTSTAYMELRSLRSDDTAVYYCARHGGTGR | |
| | GAMDYWGQGTLVTVSSASTKGPSVFPLAPSSKSTSGGTAALGCLVKDYFPEP | |
| | VTVSWNSGALTSGVHTFPAVLQSSGLYSLSSVVTVPSSSLGTQTYICNVNHK | |
| | PSNTKVDKKVEPKSCDKTHTCPPCPAPELLGGPSVFLFPPKPKDTLMISRTP | |
| | EVTCVVVDVSHEDPEVKFNWYVDGVEVHNAKTKPREEQYNSTYRVVSVLTVL | |
| | HQDWLNGKEYKCKVSNKALPAPIEKTISKAKGQPREPQVYTLPPSRDELTKN | |
| | QVSLTCLVKGFYPSDIAVEWESNGQPENNYKTTPPVLDSDGSFFLYSKLTVD | |
| | KSRWQQGNVFSCSVMHEALHNHYTQKSLSLSPGK | |
| Light | EIVLTQSPGTLSLSPGERATLSCRASQSVSTSAYSYMHWYQQKPGQAPRLLI | 894 |
| Chain | YAASNLESGIPDRFSGSGSGTDFTLTISRLEPEDFAVYYCQQSREAPYTFGQ | |
| | GTKLEIKRTVAAPSVFIFPPSDEQLKSGTASVVCLLNNFYPREAKVQWKVDN | |
| | ALQSGNSQESVTEQDSKDSTYSLSSTLTLSKADYEKHKVYACEVTHQGLSSP | |
| | VTKSFNRGEC | |

P25362538

| | | |
|---|---|---|
| Heavy | QVQLVQSGAEVKKPGASVKVSCKASGYTFTSNIIHWVRQAPGQGLEWMGWIH | 895 |
| Chain | PGSGAIKYAQKLQGRVTMTTDTSTSTAYMELRSLRSDDTAVYYCARHGGTGR | |
| | GAMDYWGQGTLVTVSSASTKGPSVFPLAPSSKSTSGGTAALGCLVKDYFPEP | |
| | VTVSWNSGALTSGVHTFPAVLQSSGLYSLSSVVTVPSSSLGTQTYICNVNHK | |
| | PSNTKVDKKVEPKSCDKTHTCPPCPAPELLGGPSVFLFPPKPKDTLMISRTP | |
| | EVTCVVVDVSHEDPEVKFNWYVDGVEVHNAKTKPREEQYNSTYRVVSVLTVL | |
| | HQDWLNGKEYKCKVSNKALPAPIEKTISKAKGQPREPQVYTLPPSRDELTKN | |
| | QVSLTCLVKGFYPSDIAVEWESNGQPENNYKTTPPVLDSDGSFFLYSKLTVD | |
| | KSRWQQGNVFSCSVMHEALHNHYTQKSLSLSPGK | |
| Light | EIVLTQSPGTLSLSPGERATLSCRASQSVSTSAYSYMHWYQQKPGQAPRLLI | 896 |
| Chain | YGASNLESGIPDRFSGSGSGTDFTLTISRLEPEDFAVYYCQQSREAPYTFGQ | |
| | GTKLEIKRTVAAPSVFIFPPSDEQLKSGTASVVCLLNNFYPREAKVQWKVDN | |
| | ALQSGNSQESVTEQDSKDSTYSLSSTLTLSKADYEKHKVYACEVTHQGLSSP | |
| | VTKSFNRGEC | |

P25362539

| | | |
|---|---|---|
| Heavy | QVQLVQSGAEVKKPGASVKVSCKASGYTFTSNIIHWVRQAPGQGLEWMGWIH | 897 |
| Chain | PGSGAIKYAQKLQGRVTMTTDTSTSTAYMELRSLRSDDTAVYYCARHGGTGR | |
| | GAMDYWGQGTLVTVSSASTKGPSVFPLAPSSKSTSGGTAALGCLVKDYFPEP | |
| | VTVSWNSGALTSGVHTFPAVLQSSGLYSLSSVVTVPSSSLGTQTYICNVNHK | |
| | PSNTKVDKKVEPKSCDKTHTCPPCPAPELLGGPSVFLFPPKPKDTLMISRTP | |
| | EVTCVVVDVSHEDPEVKFNWYVDGVEVHNAKTKPREEQYNSTYRVVSVLTVL | |
| | HQDWLNGKEYKCKVSNKALPAPIEKTISKAKGQPREPQVYTLPPSRDELTKN | |
| | QVSLTCLVKGFYPSDIAVEWESNGQPENNYKTTPPVLDSDGSFFLYSKLTVD | |
| | KSRWQQGNVFSCSVMHEALHNHYTQKSLSLSPGK | |
| Light | EIVLTQSPGTLSLSPGERATLSCRASQSVSTSAYSYMHWYQQKPGQAPRLLI | 898 |
| Chain | YGASNLESGIPDRFSGSGSGTDFTLTISRLEPEDFAVYYCQQSREYPYTFGQ | |
| | GTKLEIKRTVAAPSVFIFPPSDEQLKSGTASVVCLLNNFYPREAKVQWKVDN | |
| | ALQSGNSQESVTEQDSKDSTYSLSSTLTLSKADYEKHKVYACEVTHQGLSSP | |
| | VTKSFNRGEC | |

P26292158

| | | |
|---|---|---|
| Heavy | QVQLVQSGAEVKKPGASVKVSCKASGYTFTANIIHWVRQAPGQGLEWMGWIH | 899 |
| Chain | PGSGSIKYAQKLQGRVTMTTDTSTSTAYMELRSLRSDDTAVYYCARHGGTGR | |
| | GAMDYWGQGTLVTVSSASTKGPSVFPLAPSSKSTSGGTAALGCLVKDYFPEP | |
| | VTVSWNSGALTSGVHTFPAVLQSSGLYSLSSVVTVPSSSLGTQTYICNVNHK | |
| | PSNTKVDKKVEPKSCDKTHTCPPCPAPELLGGPSVFLLPPKPKDTLMISRTP | |
| | EVTCVVVDVSHEDPEVKFNWYVDGVEVHNAKTKPPEEQYNSTLRVVSVLTVL | |
| | HQDWLNGKEYKCKVSNKALPAPIEKTISKAKGQPREPQVYTLPPSRDELTKN | |
| | QVSLTCLVKGFYPSDIAVEWESNGQPENNYKTTPPVLDSDGSFFLYSKLTVD | |
| | KSRWQQGNVFSCSVMHEALHNHYTQKSLSLSPGK | |
| Light | EIVLTQSPGTLSLSPGERATLSCRASQSVSTSAYSYMHWYQQKPGQAPRLLI | 900 |
| Chain | YLASNLESGIPDRFSGSGSGTDFTLTISRLEPEDFAVYYCQQSRELPYTFGQ | |
| | GTKLEIKRTVAAPSVFIFPPSDEQLKSGTASVVCLLNNFYPREAKVQWKVDN | |
| | ALQSGNSQESVTEQDSKDSTYSLSSTLTLSKADYEKHKVYACEVTHQGLSSP | |
| | VTKSFNRGEC | |

P26292485

| | | |
|---|---|---|
| Heavy | QVQLVQSGAEVKKPGASVKVSCKASGYTFTANIIHWVRQAPGQGLEWMGWIH | 901 |
| Chain | PGSGSIKYAQKLQGRVTMTTDTSTSTAYMELRSLRSDDTAVYYCARHGGTGR | |
| | GAMDYWGQGTLVTVSSASTKGPSVFPLAPSSKSTSGGTAALGCLVKDYFPEP | |
| | VTVSWNSGALTSGVHTFPAVLQSSGLYSLSSVVTVPSSSLGTQTYICNVNHK | |
| | PSNTKVDKKVEPKSCDKTHTCPPCPAPELLGGPSVFLLPPKPKDTLMISRTP | |
| | EVTCVVVDVSHEDPEVKFNWYVDGVEVHNAKTKPPEEQYNSTLRVVSVLTVL | |
| | HQDWLNGKEYKCKVSNKALPAPIEKTISKAKGQPREPQVYTLPPSRDELTKN | |
| | QVSLTCLVKGFYPSDIAVEWESNGQPENNYKTTPPVLDSDGSFFLYSKLTVD | |
| | KSRWQQGNVFSCSVMHEALHNHYTQKSLSLSPGK | |
| Light | EIVLTQSPGTLSLSPGERATLSCRASQSVSTSAYSYMHWYQQKPGQAPRLLI | 902 |
| Chain | YLASNLESGIPDRFSGSGSGTDFTLTISRLEPEDFAVYYCQQSREAPYTFGQ | |
| | GTKLEIKRTVAAPSVFIFPPSDEQLKSGTASVVCLLNNFYPREAKVQWKVDN | |
| | ALQSGNSQESVTEQDSKDSTYSLSSTLTLSKADYEKHKVYACEVTHQGLSSP | |
| | VTKSFNRGEC | |

P26302158

| | | |
|---|---|---|
| Heavy | QVQLVQSGAEVKKPGASVKVSCKASGYTFTENAIHWVRQAPGQGLEWMGWIH | 903 |
| Chain | PGSGSIKYAQKLQGRVTMTTDTSTSTAYMELRSLRSDDTAVYYCARHGGTGR | |
| | GAMDYWGQGTLVTVSSASTKGPSVFPLAPSSKSTSGGTAALGCLVKDYFPEP | |
| | VTVSWNSGALTSGVHTFPAVLQSSGLYSLSSVVTVPSSSLGTQTYICNVNHK | |
| | PSNTKVDKKVEPKSCDKTHTCPPCPAPELLGGPSVFLLPPKPKDTLMISRTP | |
| | EVTCVVVDVSHEDPEVKFNWYVDGVEVHNAKTKPPEEQYNSTLRVVSVLTVL | |
| | HQDWLNGKEYKCKVSNKALPAPIEKTISKAKGQPREPQVYTLPPSRDELTKN | |
| | QVSLTCLVKGFYPSDIAVEWESNGQPENNYKTTPPVLDSDGSFFLYSKLTVD | |
| | KSRWQQGNVFSCSVMHEALHNHYTQKSLSLSPGK | |
| Light | EIVLTQSPGTLSLSPGERATLSCRASQSVSTSAYSYMHWYQQKPGQAPRLLI | 904 |
| Chain | YLASNLESGIPDRFSGSGSGTDFTLTISRLEPEDFAVYYCQQSRELPYTFGQ | |
| | GTKLEIKRTVAAPSVFIFPPSDEQLKSGTASVVCLLNNFYPREAKVQWKVDN | |
| | ALQSGNSQESVTEQDSKDSTYSLSSTLTLSKADYEKHKVYACEVTHQGLSSP | |
| | VTKSFNRGEC | |

P26312158

| | | |
|---|---|---|
| Heavy | QVQLVQSGAEVKKPGASVKVSCKASGYTFTENAIHWVRQAPGQGLEWMGWIH | 905 |
| Chain | PGSGAIKYAQKLQGRVTMTTDTSTSTAYMELRSLRSDDTAVYYCARHGGTGR | |
| | GAMDYWGQGTLVTVSSASTKGPSVFPLAPSSKSTSGGTAALGCLVKDYFPEP | |
| | VTVSWNSGALTSGVHTFPAVLQSSGLYSLSSVVTVPSSSLGTQTYICNVNHK | |
| | PSNTKVDKKVEPKSCDKTHTCPPCPAPELLGGPSVFLLPPKPKDTLMISRTP | |
| | EVTCVVVDVSHEDPEVKFNWYVDGVEVHNAKTKPPEEQYNSTLRVVSVLTVL | |
| | HQDWLNGKEYKCKVSNKALPAPIEKTISKAKGQPREPQVYTLPPSRDELTKN | |
| | QVSLTCLVKGFYPSDIAVEWESNGQPENNYKTTPPVLDSDGSFFLYSKLTVD | |
| | KSRWQQGNVFSCSVMHEALHNHYTQKSLSLSPGK | |
| Light | EIVLTQSPGTLSLSPGERATLSCRASQSVSTSAYSYMHWYQQKPGQAPRLLI | 906 |
| Chain | YLASNLESGIPDRFSGSGSGTDFTLTISRLEPEDFAVYYCQQSRELPYTFGQ | |
| | GTKLEIKRTVAAPSVFIFPPSDEQLKSGTASVVCLLNNFYPREAKVQWKVDN | |
| | ALQSGNSQESVTEQDSKDSTYSLSSTLTLSKADYEKHKVYACEVTHQGLSSP | |
| | VTKSFNRGEC | |

P26312537

| | | |
|---|---|---|
| Heavy | QVQLVQSGAEVKKPGASVKVSCKASGYTFTENIIHWVRQAPGQGLEWMGWIH | 907 |
| Chain | PGSGAIKYAQKLQGRVTMTTDTSTSTAYMELRSLRSDDTAVYYCARHGGTGR | |
| | GAMDYWGQGTLVTVSSASTKGPSVFPLAPSSKSTSGGTAALGCLVKDYFPEP | |
| | VTVSWNSGALTSGVHTFPAVLQSSGLYSLSSVVTVPSSSLGTQTYICNVNHK | |
| | PSNTKVDKKVEPKSCDKTHTCPPCPAPELLGGPSVFLLPPKPKDTLMISRTP | |
| | EVTCVVVDVSHEDPEVKFNWYVDGVEVHNAKTKPPEEQYNSTLRVVSVLTVL | |
| | HQDWLNGKEYKCKVSNKALPAPIEKTISKAKGQPREPQVYTLPPSRDELTKN | |
| | QVSLTCLVKGFYPSDIAVEWESNGQPENNYKTTPPVLDSDGSFFLYSKLTVD | |
| | KSRWQQGNVFSCSVMHEALHNHYTQKSLSLSPGK | |
| Light | EIVLTQSPGTLSLSPGERATLSCRASQSVSTSAYSYMHWYQQKPGQAPRLLI | 908 |
| Chain | YAASNLESGIPDRFSGSGSGTDFTLTISRLEPEDFAVYYCQQSREAPYTFGQ | |
| | GTKLEIKRTVAAPSVFIFPPSDEQLKSGTASVVCLLNNFYPREAKVQWKVDN | |
| | ALQSGNSQESVTEQDSKDSTYSLSSTLTLSKADYEKHKVYACEVTHQGLSSP | |
| | VTKSFNRGEC | |

P26312538

| | | |
|---|---|---|
| Heavy | QVQLVQSGAEVKKPGASVKVSCKASGYTFTENIIHWVRQAPGQGLEWMGWIH | 909 |
| Chain | PGSGAIKYAQKLQGRVTMTTDTSTSTAYMELRSLRSDDTAVYYCARHGGTGR | |
| | GAMDYWGQGTLVTVSSASTKGPSVFPLAPSSKSTSGGTAALGCLVKDYFPEP | |
| | VTVSWNSGALTSGVHTFPAVLQSSGLYSLSSVVTVPSSSLGTQTYICNVNHK | |
| | PSNTKVDKKVEPKSCDKTHTCPPCPAPELLGGPSVFLLPPKPKDTLMISRTP | |
| | EVTCVVVDVSHEDPEVKFNWYVDGVEVHNAKTKPPEEQYNSTLRVVSVLTVL | |
| | HQDWLNGKEYKCKVSNKALPAPIEKTISKAKGQPREPQVYTLPPSRDELTKN | |
| | QVSLTCLVKGFYPSDIAVEWESNGQPENNYKTTPPVLDSDGSFFLYSKLTVD | |
| | KSRWQQGNVFSCSVMHEALHNHYTQKSLSLSPGK | |
| Light | EIVLTQSPGTLSLSPGERATLSCRASQSVSTSAYSYMHWYQQKPGQAPRLLI | 910 |
| Chain | YGASNLESGIPDRFSGSGSGTDFTLTISRLEPEDFAVYYCQQSREAPYTFGQ | |
| | GTKLEIKRTVAAPSVFIFPPSDEQLKSGTASVVCLLNNFYPREAKVQWKVDN | |
| | ALQSGNSQESVTEQDSKDSTYSLSSTLTLSKADYEKHKVYACEVTHQGLSSP | |
| | VTKSFNRGEC | |

P26322158

| | | |
|---|---|---|
| Heavy | QVQLVQSGAEVKKPGASVKVSCKASGYTFTENIIHWVRQAPGQGLEWMGWIH | 911 |
| Chain | PGSGSIKYAQKLQGRVTMTTDTSTSTAYMELRSLRSDDTAVYYCARHGGTGR | |
| | AAMDYWGQGTLVTVSSASTKGPSVFPLAPSSKSTSGGTAALGCLVKDYFPEP | |
| | VTVSWNSGALTSGVHTFPAVLQSSGLYSLSSVVTVPSSSLGTQTYICNVNHK | |
| | PSNTKVDKKVEPKSCDKTHTCPPCPAPELLGGPSVFLLPPKPKDTLMISRTP | |
| | EVTCVVVDVSHEDPEVKFNWYVDGVEVHNAKTKPPEEQYNSTLRVVSVLTVL | |
| | HQDWLNGKEYKCKVSNKALPAPIEKTISKAKGQPREPQVYTLPPSRDELTKN | |
| | QVSLTCLVKGFYPSDIAVEWESNGQPENNYKTTPPVLDSDGSFFLYSKLTVD | |
| | KSRWQQGNVFSCSVMHEALHNHYTQKSLSLSPGK | |
| Light | EIVLTQSPGTLSLSPGERATLSCRASQSVSTSAYSYMHWYQQKPGQAPRLLI | 912 |
| Chain | YLASNLESGIPDRFSGSGSGTDFTLTISRLEPEDFAVYYCQQSRELPYTFGQ | |
| | GTKLEIKRTVAAPSVFIFPPSDEQLKSGTASVVCLLNNFYPREAKVQWKVDN | |
| | ALQSGNSQESVTEQDSKDSTYSLSSTLTLSKADYEKHKVYACEVTHQGLSSP | |
| | VTKSFNRGEC | |

P26332158

| | | |
|---|---|---|
| Heavy | QVQLVQSGAEVKKPGASVKVSCKASGYTFTENIIHWVRQAPGQGLEWMGWIH | 913 |
| Chain | PGSGSIKYAQKLQGRVTMTTDTSTSTAYMELRSLRSDDTAVYYCARHGGTGR | |
| | AAMDYWGQGTLVTVSSASTKGPSVFPLAPSSKSTSGGTAALGCLVKDYFPEP | |
| | VTVSWNSGALTSGVHTFPAVLQSSGLYSLSSVVTVPSSSLGTQTYICNVNHK | |
| | PSNTKVDKKVEPKSCDKTHTCPPCPAPELVGGPSVFLLPPKPKDTLMISRTP | |
| | EVTCVVVDVSHEDPEVKFNWYVDGVEVHNAKTKPPEEQYNSTLRVVSVLTVL | |
| | HQDWLNGKEYKCKVSNKALPAPIEKTISKAKGQPREPQVYTLPPSRDELTKN | |
| | QVSLTCLVKGFYPSDIAVEWESNGQPENNYKTTPLVLDSDGSFFLYSKLTVD | |
| | KSRWQQGNVFSCSVMHEALHNHYTQKSLSLSPGK | |
| Light | EIVLTQSPGTLSLSPGERATLSCRASQSVSTSAYSYMHWYQQKPGQAPRLLI | 914 |
| Chain | YLASNLESGIPDRFSGSGSGTDFTLTISRLEPEDFAVYYCQQSRELPYTFGQ | |
| | GTKLEIKRTVAAPSVFIFPPSDEQLKSGTASVVCLLNNFYPREAKVQWKVDN | |
| | ALQSGNSQESVTEQDSKDSTYSLSSTLTLSKADYEKHKVYACEVTHQGLSSP | |
| | VTKSFNRGEC | |

P26342472

| | | |
|---|---|---|
| Heavy | QVQLVQSGAEVKKPGASVKVSCKASGYTFTENIIHWVRQAPGQGLEWMGWIH | 915 |
| Chain | PGSGSIKYAQKLQGRVTMTTDTSTSTAYMELRSLRSDDTAVYYCARHGGTGR | |
| | GAMDYWGQGTLVTVSSASTKGPSVFPLAPSSKSTSGGTAALGCLVKDYFPEP | |
| | VTVSWNSGALTSGVHTFPAVLQSSGLYSLSSVVTVPSSSLGTQTYICNVNHK | |
| | PSNTKVDKKVEPKSCDKTHTCPPCPAPELLGGPSVFLLPPKPKDTLMISRTP | |
| | EVTCVVVDVSHEDPEVKFNWYVDGVEVHNAKTKPPEEQYNSTLRVVSVLTVL | |
| | HQDWLNGKEYKCKVSNKALPAPIEKTISKAKGQPREPQVYTLPPSRDELTKN | |
| | QVSLTCLVKGFYPSDIAVEWESNGQPENNYKTTPPVLDSDGSFFLYSKLTVD | |
| | KSRWQQGNVFSCSVMHEALHNHYTQKSLSLSPGK | |
| Light | EIVLTQSPGTLSLSPGERATLSCRASQSVSTSAASYMHWYQQKPGQAPRLLI | 916 |
| Chain | YLASNLESGIPDRFSGSGSGTDFTLTISRLEPEDFAVYYCQQSRELPYTFGQ | |
| | GTKLEIKRTVAAPSVFIFPPSDEQLKSGTASVVCLLNNFYPREAKVQWKVDN | |
| | ALQSGNSQESVTEQDSKDSTYSLSSTLTLSKADYEKHKVYACEVTHQGLSSP | |
| | VTKSFNRGEC | |

P26342476

| | | |
|---|---|---|
| Heavy | QVQLVQSGAEVKKPGASVKVSCKASGYTFTENIIHWVRQAPGQGLEWMGWIH | 917 |
| Chain | PGSGSIKYAQKLQGRVTMTTDTSTSTAYMELRSLRSDDTAVYYCARHGGTGR | |
| | GAMDYWGQGTLVTVSSASTKGPSVFPLAPSSKSTSGGTAALGCLVKDYFPEP | |
| | VTVSWNSGALTSGVHTFPAVLQSSGLYSLSSVVTVPSSSLGTQTYICNVNHK | |
| | PSNTKVDKKVEPKSCDKTHTCPPCPAPELLGGPSVFLLPPKPKDTLMISRTP | |
| | EVTCVVVDVSHEDPEVKFNWYVDGVEVHNAKTKPPEEQYNSTLRVVSVLTVL | |
| | HQDWLNGKEYKCKVSNKALPAPIEKTISKAKGQPREPQVYTLPPSRDELTKN | |
| | QVSLTCLVKGFYPSDIAVEWESNGQPENNYKTTPPVLDSDGSFFLYSKLTVD | |
| | KSRWQQGNVFSCSVMHEALHNHYTQKSLSLSPGK | |
| Light | EIVLTQSPGTLSLSPGERATLSCRASQSVSTSAYSYMHWYQQKPGQAPRLLI | 918 |
| Chain | YAASNLESGIPDRFSGSGSGTDFTLTISRLEPEDFAVYYCQQSRELPYTFGQ | |
| | GTKLEIKRTVAAPSVFIFPPSDEQLKSGTASVVCLLNNFYPREAKVQWKVDN | |
| | ALQSGNSQESVTEQDSKDSTYSLSSTLTLSKADYEKHKVYACEVTHQGLSSP | |
| | VTKSFNRGEC | |

P26342482

| | | |
|---|---|---|
| Heavy | QVQLVQSGAEVKKPGASVKVSCKASGYTFTENIIHWVRQAPGQGLEWMGWIH | 919 |
| Chain | PGSGSIKYAQKLQGRVTMTTDTSTSTAYMELRSLRSDDTAVYYCARHGGTGR | |
| | GAMDYWGQGTLVTVSSASTKGPSVFPLAPSSKSTSGGTAALGCLVKDYFPEP | |
| | VTVSWNSGALTSGVHTFPAVLQSSGLYSLSSVVTVPSSSLGTQTYICNVNHK | |
| | PSNTKVDKKVEPKSCDKTHTCPPCPAPELLGGPSVFLLPPKPKDTLMISRTP | |
| | EVTCVVVDVSHEDPEVKFNWYVDGVEVHNAKTKPPEEQYNSTLRVVSVLTVL | |
| | HQDWLNGKEYKCKVSNKALPAPIEKTISKAKGQPREPQVYTLPPSRDELTKN | |
| | QVSLTCLVKGFYPSDIAVEWESNGQPENNYKTTPPVLDSDGSFFLYSKLTVD | |
| | KSRWQQGNVFSCSVMHEALHNHYTQKSLSLSPGK | |
| Light | EIVLTQSPGTLSLSPGERATLSCRASQSVSTSAYSYMHWYQQKPGQAPRLLI | 920 |
| Chain | YLASNLESGIPDRFSGSGSGTDFTLTISRLEPEDFAVYYCQQARELPYTFGQ | |
| | GTKLEIKRTVAAPSVFIFPPSDEQLKSGTASVVCLLNNFYPREAKVQWKVDN | |
| | ALQSGNSQESVTEQDSKDSTYSLSSTLTLSKADYEKHKVYACEVTHQGLSSP | |
| | VTKSFNRGEC | |

P26342485

| | | |
|---|---|---|
| Heavy | QVQLVQSGAEVKKPGASVKVSCKASGYTFTENIIHWVRQAPGQGLEWMGWIH | 921 |
| Chain | PGSGSIKYAQKLQGRVTMTTDTSTSTAYMELRSLRSDDTAVYYCARHGGTGR | |
| | GAMDYWGQGTLVTVSSASTKGPSVFPLAPSSKSTSGGTAALGCLVKDYFPEP | |
| | VTVSWNSGALTSGVHTFPAVLQSSGLYSLSSVVTVPSSSLGTQTYICNVNHK | |
| | PSNTKVDKKVEPKSCDKTHTCPPCPAPELLGGPSVFLLPPKPKDTLMISRTP | |
| | EVTCVVVDVSHEDPEVKFNWYVDGVEVHNAKTKPPEEQYNSTLRVVSVLTVL | |
| | HQDWLNGKEYKCKVSNKALPAPIEKTISKAKGQPREPQVYTLPPSRDELTKN | |
| | QVSLTCLVKGFYPSDIAVEWESNGQPENNYKTTPPVLDSDGSFFLYSKLTVD | |
| | KSRWQQGNVFSCSVMHEALHNHYTQKSLSLSPGK | |
| Light | EIVLTQSPGTLSLSPGERATLSCRASQSVSTSAYSYMHWYQQKPGQAPRLLI | 922 |
| Chain | YLASNLESGIPDRFSGSGSGTDFTLTISRLEPEDFAVYYCQQSREAPYTFGQ | |
| | GTKLEIKRTVAAPSVFIFPPSDEQLKSGTASVVCLLNNFYPREAKVQWKVDN | |
| | ALQSGNSQESVTEQDSKDSTYSLSSTLTLSKADYEKHKVYACEVTHQGLSSP | |
| | VTKSFNRGEC | |

P26352158

| | | |
|---|---|---|
| Heavy | QVQLVQSGAEVKKPGASVKVSCKASGYTFTSNIIHWVRQAPGQGLEWMGWIH | 923 |
| Chain | PGSGAIKYAQKLQGRVTMTTDTSTSTAYMELRSLRSDDTAVYYCARHGGTGR | |
| | GAMDYWGQGTLVTVSSASTKGPSVFPLAPSSKSTSGGTAALGCLVKDYFPEP | |
| | VTVSWNSGALTSGVHTFPAVLQSSGLYSLSSVVTVPSSSLGTQTYICNVNHK | |
| | PSNTKVDKKVEPKSCDKTHTCPPCPAPELLGGPSVFLLPPKPKDTLMISRTP | |
| | EVTCVVVDVSHEDPEVKFNWYVDGVEVHNAKTKPPEEQYNSTLRVVSVLTVL | |
| | HQDWLNGKEYKCKVSNKALPAPIEKTISKAKGQPREPQVYTLPPSRDELTKN | |
| | QVSLTCLVKGFYPSDIAVEWESNGQPENNYKTTPPVLDSDGSFFLYSKLTVD | |
| | KSRWQQGNVFSCSVMHEALHNHYTQKSLSLSPGK | |
| Light | EIVLTQSPGTLSLSPGERATLSCRASQSVSTSAYSYMHWYQQKPGQAPRLLI | 924 |
| Chain | YLASNLESGIPDRFSGSGSGTDFTLTISRLEPEDFAVYYCQQSRELPYTFGQ | |
| | GTKLEIKRTVAAPSVFIFPPSDEQLKSGTASVVCLLNNFYPREAKVQWKVDN | |
| | ALQSGNSQESVTEQDSKDSTYSLSSTLTLSKADYEKHKVYACEVTHQGLSSP | |
| | VTKSFNRGEC | |

P26352538

| | | |
|---|---|---|
| Heavy | QVQLVQSGAEVKKPGASVKVSCKASGYTFTSNIIHWVRQAPGQGLEWMGWIH | 925 |
| Chain | PGSGAIKYAQKLQGRVTMTTDTSTSTAYMELRSLRSDDTAVYYCARHGGTGR | |
| | GAMDYWGQGTLVTVSSASTKGPSVFPLAPSSKSTSGGTAALGCLVKDYFPEP | |
| | VTVSWNSGALTSGVHTFPAVLQSSGLYSLSSVVTVPSSSLGTQTYICNVNHK | |
| | PSNTKVDKKVEPKSCDKTHTCPPCPAPELLGGPSVFLLPPKPKDTLMISRTP | |
| | EVTCVVVDVSHEDPEVKFNWYVDGVEVHNAKTKPPEEQYNSTLRVVSVLTVL | |
| | HQDWLNGKEYKCKVSNKALPAPIEKTISKAKGQPREPQVYTLPPSRDELTKN | |
| | QVSLTCLVKGFYPSDIAVEWESNGQPENNYKTTPPVLDSDGSFFLYSKLTVD | |
| | KSRWQQGNVFSCSVMHEALHNHYTQKSLSLSPGK | |
| Light | EIVLTQSPGTLSLSPGERATLSCRASQSVSTSAYSYMHWYQQKPGQAPRLLI | 926 |
| Chain | YGASNLESGIPDRFSGSGSGTDFTLTISRLEPEDFAVYYCQQSREAPYTFGQ | |
| | GTKLEIKRTVAAPSVFIFPPSDEQLKSGTASVVCLLNNFYPREAKVQWKVDN | |
| | ALQSGNSQESVTEQDSKDSTYSLSSTLTLSKADYEKHKVYACEVTHQGLSSP | |
| | VTKSFNRGEC | |

P26362537

| | | |
|---|---|---|
| Heavy | QVQLVQSGAEVKKPGASVKVSCKASGYTFTANIIHWVRQAPGQGLEWMGWIH | 927 |
| Chain | PGSGAIKYAQKLQGRVTMTTDTSTSTAYMELRSLRSDDTAVYYCARHGGTGR | |
| | GAMDYWGQGTLVTVSSASTKGPSVFPLAPSSKSTSGGTAALGCLVKDYFPEP | |
| | VTVSWNSGALTSGVHTFPAVLQSSGLYSLSSVVTVPSSSLGTQTYICNVNHK | |
| | PSNTKVDKKVEPKSCDKTHTCPPCPAPELLGGPSVFLLPPKPKDTLMISRTP | |
| | EVTCVVVDVSHEDPEVKFNWYVDGVEVHNAKTKPPEEQYNSTLRVVSVLTVL | |
| | HQDWLNGKEYKCKVSNKALPAPIEKTISKAKGQPREPQVYTLPPSRDELTKN | |
| | QVSLTCLVKGFYPSDIAVEWESNGQPENNYKTTPPVLDSDGSFFLYSKLTVD | |
| | KSRWQQGNVFSCSVMHEALHNHYTQKSLSLSPGK | |
| Light | EIVLTQSPGTLSLSPGERATLSCRASQSVSTSAYSYMHWYQQKPGQAPRLLI | 928 |
| Chain | YAASNLESGIPDRFSGSGSGTDFTLTISRLEPEDFAVYYCQQSREAPYTFGQ | |
| | GTKLEIKRTVAAPSVFIFPPSDEQLKSGTASVVCLLNNFYPREAKVQWKVDN | |
| | ALQSGNSQESVTEQDSKDSTYSLSSTLTLSKADYEKHKVYACEVTHQGLSSP | |
| | VTKSFNRGEC | |

P26372538

| | | |
|---|---|---|
| Heavy | QVQLVQSGAEVKKPGASVKVSCKASGYTFTSNIIHWVRQAPGQGLEWMGWIH | 929 |
| Chain | PGSGAIKYAQKLQGRVTMTTDTSTSTAYMELRSLRSDDTAVYYCARHGGTGR | |
| | GAMDYWGQGTLVTVSSASTKGPSVFPLAPSSKSTSGGTAALGCLVKDYFPEP | |
| | VTVSWNSGALTSGVHTFPAVLQSSGLYSLSSVVTVPSSSLGTQTYICNVNHK | |
| | PSNTKVDKKVEPKSCDKTHTCPPCPAPELVGGPSVFLLPPKPKDTLMISRTP | |
| | EVTCVVVDVSHEDPEVKFNWYVDGVEVHNAKTKPPEEQYNSTLRVVSVLTVL | |
| | HQDWLNGKEYKCKVSNKALPAPIEKTISKAKGQPREPQVYTLPPSRDELTKN | |
| | QVSLTCLVKGFYPSDIAVEWESNGQPENNYKTTPLVLDSDGSFFLYSKLTVD | |
| | KSRWQQGNVFSCSVMHEALHNHYTQKSLSLSPGK | |
| Light | EIVLTQSPGTLSLSPGERATLSCRASQSVSTSAYSYMHWYQQKPGQAPRLLI | 930 |
| Chain | YGASNLESGIPDRFSGSGSGTDFTLTISRLEPEDFAVYYCQQSREAPYTFGQ | |
| | GTKLEIKRTVAAPSVFIFPPSDEQLKSGTASVVCLLNNFYPREAKVQWKVDN | |
| | ALQSGNSQESVTEQDSKDSTYSLSSTLTLSKADYEKHKVYACEVTHQGLSSP | |
| | VTKSFNRGEC | |

P28742158

| | | |
|---|---|---|
| Heavy | QVQLVQSGAEVKKPGASVKVSCKASGYTFTSNIIHWVRQAPGQGLEWMGWFH | 931 |
| Chain | PGSGAIKYAQKLQGRVTMTTDTSTSTAYMELRSLRSDDTAVYYCARHGGTGR | |
| | GAMDYWGQGTLVTVSSASTKGPSVFPLAPSSKSTSGGTAALGCLVKDYFPEP | |
| | VTVSWNSGALTSGVHTFPAVLQSSGLYSLSSVVTVPSSSLGTQTYICNVNHK | |
| | PSNTKVDKKVEPKSCDKTHTCPPCPAPELLGGPSVFLFPPKPKDTLMISRTP | |
| | EVTCVVVDVSHEDPEVKFNWYVDGVEVHNAKTKPREEQYNSTYRVVSVLTVL | |
| | HQDWLNGKEYKCKVSNKALPAPIEKTISKAKGQPREPQVYTLPPSRDELTKN | |
| | QVSLTCLVKGFYPSDIAVEWESNGQPENNYKTTPPVLDSDGSFFLYSKLTVD | |
| | KSRWQQGNVFSCSVMHEALHNHYTQKSLSLSPGK | |
| Light | EIVLTQSPGTLSLSPGERATLSCRASQSVSTSAYSYMHWYQQKPGQAPRLLI | 932 |
| Chain | YLASNLESGIPDRFSGSGSGTDFTLTISRLEPEDFAVYYCQQSRELPYTFGQ | |
| | GTKLEIKRTVAAPSVFIFPPSDEQLKSGTASVVCLLNNFYPREAKVQWKVDN | |
| | ALQSGNSQESVTEQDSKDSTYSLSSTLTLSKADYEKHKVYACEVTHQGLSSP | |
| | VTKSFNRGEC | |

P28752158

| | | |
|---|---|---|
| Heavy | QVQLVQSGAEVKKPGASVKVSCKASGYTFTDNIIHWVRQAPGQGLEWMGWIH | 933 |
| Chain | PGSGAIKYAQKLQGRVTMTTDTSTSTAYMELRSLRSDDTAVYYCARHGGTGR | |
| | GAMDYWGQGTLVTVSSASTKGPSVFPLAPSSKSTSGGTAALGCLVKDYFPEP | |
| | VTVSWNSGALTSGVHTFPAVLQSSGLYSLSSVVTVPSSSLGTQTYICNVNHK | |
| | PSNTKVDKKVEPKSCDKTHTCPPCPAPELLGGPSVFLFPPKPKDTLMISRTP | |
| | EVTCVVVDVSHEDPEVKFNWYVDGVEVHNAKTKPREEQYNSTYRVVSVLTVL | |
| | HQDWLNGKEYKCKVSNKALPAPIEKTISKAKGQPREPQVYTLPPSRDELTKN | |
| | QVSLTCLVKGFYPSDIAVEWESNGQPENNYKTTPPVLDSDGSFFLYSKLTVD | |
| | KSRWQQGNVFSCSVMHEALHNHYTQKSLSLSPGK | |
| Light | EIVLTQSPGTLSLSPGERATLSCRASQSVSTSAYSYMHWYQQKPGQAPRLLI | 934 |
| Chain | YLASNLESGIPDRFSGSGSGTDFTLTISRLEPEDFAVYYCQQSRELPYTFGQ | |
| | GTKLEIKRTVAAPSVFIFPPSDEQLKSGTASVVCLLNNFYPREAKVQWKVDN | |
| | ALQSGNSQESVTEQDSKDSTYSLSSTLTLSKADYEKHKVYACEVTHQGLSSP | |
| | VTKSFNRGEC | |

P28762158

| | | |
|---|---|---|
| Heavy | QVQLVQSGAEVKKPGASVKVSCKASGYTFTENIIHWVRQAPGQGLEWMGWIH | 935 |
| Chain | PGSGAIKYAQKLQGRVTMTTDTSTSTAYMELRSLRSDDTAVYYCARHGGTGR | |
| | GAMDYWGQGTLVTVSSASTKGPSVFPLAPSSKSTSGGTAALGCLVKDYFPEP | |
| | VTVSWNSGALTSGVHTFPAVLQSSGLYSLSSVVTVPSSSLGTQTYICNVNHK | |
| | PSNTKVDKKVEPKSCDKTHTCPPCPAPELLGGPSVFLFPPKPKDTLMISRTP | |
| | EVTCVVVDVSHEDPEVKFNWYVDGVEVHNAKTKPREEQYNSTYRVVSVLTVL | |
| | HQDWLNGKEYKCKVSNKALPAPIEKTISKAKGQPREPQVYTLPPSRDELTKN | |
| | QVSLTCLVKGFYPSDIAVEWESNGQPENNYKTTPPVLDSDGSFFLYSKLTVD | |
| | KSRWQQGNVFSCSVMHEALHNHYTQKSLSLSPGK | |
| Light | EIVLTQSPGTLSLSPGERATLSCRASQSVSTSAYSYMHWYQQKPGQAPRLLI | 936 |
| Chain | YLASNLESGIPDRFSGSGSGTDFTLTISRLEPEDFAVYYCQQSRELPYTFGQ | |
| | GTKLEIKRTVAAPSVFIFPPSDEQLKSGTASVVCLLNNFYPREAKVQWKVDN | |
| | ALQSGNSQESVTEQDSKDSTYSLSSTLTLSKADYEKHKVYACEVTHQGLSSP | |
| | VTKSFNRGEC | |

P28772158

| | | |
|---|---|---|
| Heavy | QVQLVQSGAEVKKPGASVKVSCKASGYTFTFNIIHWVRQAPGQGLEWMGWIH | 937 |
| Chain | PGSGAIKYAQKLQGRVTMTTDTSTSTAYMELRSLRSDDTAVYYCARHGGTGR | |
| | GAMDYWGQGTLVTVSSASTKGPSVFPLAPSSKSTSGGTAALGCLVKDYFPEP | |
| | VTVSWNSGALTSGVHTFPAVLQSSGLYSLSSVVTVPSSSLGTQTYICNVNHK | |
| | PSNTKVDKKVEPKSCDKTHTCPPCPAPELLGGPSVFLFPPKPKDTLMISRTP | |
| | EVTCVVVDVSHEDPEVKFNWYVDGVEVHNAKTKPREEQYNSTYRVVSVLTVL | |
| | HQDWLNGKEYKCKVSNKALPAPIEKTISKAKGQPREPQVYTLPPSRDELTKN | |
| | QVSLTCLVKGFYPSDIAVEWESNGQPENNYKTTPPVLDSDGSFFLYSKLTVD | |
| | KSRWQQGNVFSCSVMHEALHNHYTQKSLSLSPGK | |
| Light | EIVLTQSPGTLSLSPGERATLSCRASQSVSTSAYSYMHWYQQKPGQAPRLLI | 938 |
| Chain | YLASNLESGIPDRFSGSGSGTDFTLTISRLEPEDFAVYYCQQSRELPYTFGQ | |
| | GTKLEIKRTVAAPSVFIFPPSDEQLKSGTASVVCLLNNFYPREAKVQWKVDN | |
| | ALQSGNSQESVTEQDSKDSTYSLSSTLTLSKADYEKHKVYACEVTHQGLSSP | |
| | VTKSFNRGEC | |

P28782158

| | | |
|---|---|---|
| Heavy | QVQLVQSGAEVKKPGASVKVSCKASGYTFTGNIIHWVRQAPGQGLEWMGWIH | 939 |
| Chain | PGSGAIKYAQKLQGRVTMTTDTSTSTAYMELRSLRSDDTAVYYCARHGGTGR | |
| | GAMDYWGQGTLVTVSSASTKGPSVFPLAPSSKSTSGGTAALGCLVKDYFPEP | |
| | VTVSWNSGALTSGVHTFPAVLQSSGLYSLSSVVTVPSSSLGTQTYICNVNHK | |
| | PSNTKVDKKVEPKSCDKTHTCPPCPAPELLGGPSVFLFPPKPKDTLMISRTP | |
| | EVTCVVVDVSHEDPEVKFNWYVDGVEVHNAKTKPREEQYNSTYRVVSVLTVL | |
| | HQDWLNGKEYKCKVSNKALPAPIEKTISKAKGQPREPQVYTLPPSRDELTKN | |
| | QVSLTCLVKGFYPSDIAVEWESNGQPENNYKTTPPVLDSDGSFFLYSKLTVD | |
| | KSRWQQGNVFSCSVMHEALHNHYTQKSLSLSPGK | |
| Light | EIVLTQSPGTLSLSPGERATLSCRASQSVSTSAYSYMHWYQQKPGQAPRLLI | 940 |
| Chain | YLASNLESGIPDRFSGSGSGTDFTLTISRLEPEDFAVYYCQQSRELPYTFGQ | |
| | GTKLEIKRTVAAPSVFIFPPSDEQLKSGTASVVCLLNNFYPREAKVQWKVDN | |
| | ALQSGNSQESVTEQDSKDSTYSLSSTLTLSKADYEKHKVYACEVTHQGLSSP | |
| | VTKSFNRGEC | |

P28792158

| | | |
|---|---|---|
| Heavy | QVQLVQSGAEVKKPGASVKVSCKASGYTFTHNIIHWVRQAPGQGLEWMGWIH | 941 |
| Chain | PGSGAIKYAQKLQGRVTMTTDTSTSTAYMELRSLRSDDTAVYYCARHGGTGR | |
| | GAMDYWGQGTLVTVSSASTKGPSVFPLAPSSKSTSGGTAALGCLVKDYFPEP | |
| | VTVSWNSGALTSGVHTFPAVLQSSGLYSLSSVVTVPSSSLGTQTYICNVNHK | |
| | PSNTKVDKKVEPKSCDKTHTCPPCPAPELLGGPSVFLFPPKPKDTLMISRTP | |
| | EVTCVVVDVSHEDPEVKFNWYVDGVEVHNAKTKPREEQYNSTYRVVSVLTVL | |
| | HQDWLNGKEYKCKVSNKALPAPIEKTISKAKGQPREPQVYTLPPSRDELTKN | |
| | QVSLTCLVKGFYPSDIAVEWESNGQPENNYKTTPPVLDSDGSFFLYSKLTVD | |
| | KSRWQQGNVFSCSVMHEALHNHYTQKSLSLSPGK | |
| Light | EIVLTQSPGTLSLSPGERATLSCRASQSVSTSAYSYMHWYQQKPGQAPRLLI | 942 |
| Chain | YLASNLESGIPDRFSGSGSGTDFTLTISRLEPEDFAVYYCQQSRELPYTFGQ | |
| | GTKLEIKRTVAAPSVFIFPPSDEQLKSGTASVVCLLNNFYPREAKVQWKVDN | |
| | ALQSGNSQESVTEQDSKDSTYSLSSTLTLSKADYEKHKVYACEVTHQGLSSP | |
| | VTKSFNRGEC | |

P28802158

| | | |
|---|---|---|
| Heavy | QVQLVQSGAEVKKPGASVKVSCKASGYTFTINIIHWVRQAPGQGLEWMGWIH | 943 |
| Chain | PGSGAIKYAQKLQGRVTMTTDTSTSTAYMELRSLRSDDTAVYYCARHGGTGR | |
| | GAMDYWGQGTLVTVSSASTKGPSVFPLAPSSKSTSGGTAALGCLVKDYFPEP | |
| | VTVSWNSGALTSGVHTFPAVLQSSGLYSLSSVVTVPSSSLGTQTYICNVNHK | |
| | PSNTKVDKKVEPKSCDKTHTCPPCPAPELLGGPSVFLFPPKPKDTLMISRTP | |
| | EVTCVVVDVSHEDPEVKFNWYVDGVEVHNAKTKPREEQYNSTYRVVSVLTVL | |
| | HQDWLNGKEYKCKVSNKALPAPIEKTISKAKGQPREPQVYTLPPSRDELTKN | |
| | QVSLTCLVKGFYPSDIAVEWESNGQPENNYKTTPPVLDSDGSFFLYSKLTVD | |
| | KSRWQQGNVFSCSVMHEALHNHYTQKSLSLSPGK | |
| Light | EIVLTQSPGTLSLSPGERATLSCRASQSVSTSAYSYMHWYQQKPGQAPRLLI | 944 |
| Chain | YLASNLESGIPDRFSGSGSGTDFTLTISRLEPEDFAVYYCQQSRELPYTFGQ | |
| | GTKLEIKRTVAAPSVFIFPPSDEQLKSGTASVVCLLNNFYPREAKVQWKVDN | |
| | ALQSGNSQESVTEQDSKDSTYSLSSTLTLSKADYEKHKVYACEVTHQGLSSP | |
| | VTKSFNRGEC | |

P28812158

| | | |
|---|---|---|
| Heavy | QVQLVQSGAEVKKPGASVKVSCKASGYTFTKNIIHWVRQAPGQGLEWMGWIH | 945 |
| Chain | PGSGAIKYAQKLQGRVTMTTDTSTSTAYMELRSLRSDDTAVYYCARHGGTGR | |
| | GAMDYWGQGTLVTVSSASTKGPSVFPLAPSSKSTSGGTAALGCLVKDYFPEP | |
| | VTVSWNSGALTSGVHTFPAVLQSSGLYSLSSVVTVPSSSLGTQTYICNVNHK | |
| | PSNTKVDKKVEPKSCDKTHTCPPCPAPELLGGPSVFLFPPKPKDTLMISRTP | |
| | EVTCVVVDVSHEDPEVKFNWYVDGVEVHNAKTKPREEQYNSTYRVVSVLTVL | |
| | HQDWLNGKEYKCKVSNKALPAPIEKTISKAKGQPREPQVYTLPPSRDELTKN | |
| | QVSLTCLVKGFYPSDIAVEWESNGQPENNYKTTPPVLDSDGSFFLYSKLTVD | |
| | KSRWQQGNVFSCSVMHEALHNHYTQKSLSLSPGK | |
| Light | EIVLTQSPGTLSLSPGERATLSCRASQSVSTSAYSYMHWYQQKPGQAPRLLI | 946 |
| Chain | YLASNLESGIPDRFSGSGSGTDFTLTISRLEPEDFAVYYCQQSRELPYTFGQ | |
| | GTKLEIKRTVAAPSVFIFPPSDEQLKSGTASVVCLLNNFYPREAKVQWKVDN | |
| | ALQSGNSQESVTEQDSKDSTYSLSSTLTLSKADYEKHKVYACEVTHQGLSSP | |
| | VTKSFNRGEC | |

P28822158

| | | |
|---|---|---|
| Heavy | QVQLVQSGAEVKKPGASVKVSCKASGYTFTLNIIHWVRQAPGQGLEWMGWIH | 947 |
| Chain | PGSGAIKYAQKLQGRVTMTTDTSTSTAYMELRSLRSDDTAVYYCARHGGTGR | |
| | GAMDYWGQGTLVTVSSASTKGPSVFPLAPSSKSTSGGTAALGCLVKDYFPEP | |
| | VTVSWNSGALTSGVHTFPAVLQSSGLYSLSSVVTVPSSSLGTQTYICNVNHK | |
| | PSNTKVDKKVEPKSCDKTHTCPPCPAPELLGGPSVFLFPPKPKDTLMISRTP | |
| | EVTCVVVDVSHEDPEVKFNWYVDGVEVHNAKTKPREEQYNSTYRVVSVLTVL | |
| | HQDWLNGKEYKCKVSNKALPAPIEKTISKAKGQPREPQVYTLPPSRDELTKN | |
| | QVSLTCLVKGFYPSDIAVEWESNGQPENNYKTTPPVLDSDGSFFLYSKLTVD | |
| | KSRWQQGNVFSCSVMHEALHNHYTQKSLSLSPGK | |
| Light | EIVLTQSPGTLSLSPGERATLSCRASQSVSTSAYSYMHWYQQKPGQAPRLLI | 948 |
| Chain | YLASNLESGIPDRFSGSGSGTDFTLTISRLEPEDFAVYYCQQSRELPYTFGQ | |
| | GTKLEIKRTVAAPSVFIFPPSDEQLKSGTASVVCLLNNFYPREAKVQWKVDN | |
| | ALQSGNSQESVTEQDSKDSTYSLSSTLTLSKADYEKHKVYACEVTHQGLSSP | |
| | VTKSFNRGEC | |

P28832158

| | | |
|---|---|---|
| Heavy | QVQLVQSGAEVKKPGASVKVSCKASGYTFTMNIIHWVRQAPGQGLEWMGWIH | 949 |
| Chain | PGSGAIKYAQKLQGRVTMTTDTSTSTAYMELRSLRSDDTAVYYCARHGGTGR | |
| | GAMDYWGQGTLVTVSSASTKGPSVFPLAPSSKSTSGGTAALGCLVKDYFPEP | |
| | VTVSWNSGALTSGVHTFPAVLQSSGLYSLSSVVTVPSSSLGTQTYICNVNHK | |
| | PSNTKVDKKVEPKSCDKTHTCPPCPAPELLGGPSVFLFPPKPKDTLMISRTP | |
| | EVTCVVVDVSHEDPEVKFNWYVDGVEVHNAKTKPREEQYNSTYRVVSVLTVL | |
| | HQDWLNGKEYKCKVSNKALPAPIEKTISKAKGQPREPQVYTLPPSRDELTKN | |
| | QVSLTCLVKGFYPSDIAVEWESNGQPENNYKTTPPVLDSDGSFFLYSKLTVD | |
| | KSRWQQGNVFSCSVMHEALHNHYTQKSLSLSPGK | |
| Light | EIVLTQSPGTLSLSPGERATLSCRASQSVSTSAYSYMHWYQQKPGQAPRLLI | 950 |
| Chain | YLASNLESGIPDRFSGSGSGTDFTLTISRLEPEDFAVYYCQQSRELPYTFGQ | |
| | GTKLEIKRTVAAPSVFIFPPSDEQLKSGTASVVCLLNNFYPREAKVQWKVDN | |
| | ALQSGNSQESVTEQDSKDSTYSLSSTLTLSKADYEKHKVYACEVTHQGLSSP | |
| | VTKSFNRGEC | |

P28842158

| | | |
|---|---|---|
| Heavy | QVQLVQSGAEVKKPGASVKVSCKASGYTFTNNIIHWVRQAPGQGLEWMGWIH | 951 |
| Chain | PGSGAIKYAQKLQGRVTMTTDTSTSTAYMELRSLRSDDTAVYYCARHGGTGR | |
| | GAMDYWGQGTLVTVSSASTKGPSVFPLAPSSKSTSGGTAALGCLVKDYFPEP | |
| | VTVSWNSGALTSGVHTFPAVLQSSGLYSLSSVVTVPSSSLGTQTYICNVNHK | |
| | PSNTKVDKKVEPKSCDKTHTCPPCPAPELLGGPSVFLFPPKPKDTLMISRTP | |
| | EVTCVVVDVSHEDPEVKFNWYVDGVEVHNAKTKPREEQYNSTYRVVSVLTVL | |
| | HQDWLNGKEYKCKVSNKALPAPIEKTISKAKGQPREPQVYTLPPSRDELTKN | |
| | QVSLTCLVKGFYPSDIAVEWESNGQPENNYKTTPPVLDSDGSFFLYSKLTVD | |
| | KSRWQQGNVFSCSVMHEALHNHYTQKSLSLSPGK | |
| Light | EIVLTQSPGTLSLSPGERATLSCRASQSVSTSAYSYMHWYQQKPGQAPRLLI | 952 |
| Chain | YLASNLESGIPDRFSGSGSGTDFTLTISRLEPEDFAVYYCQQSRELPYTFGQ | |
| | GTKLEIKRTVAAPSVFIFPPSDEQLKSGTASVVCLLNNFYPREAKVQWKVDN | |
| | ALQSGNSQESVTEQDSKDSTYSLSSTLTLSKADYEKHKVYACEVTHQGLSSP | |
| | VTKSFNRGEC | |

P28852158

| | | |
|---|---|---|
| Heavy | QVQLVQSGAEVKKPGASVKVSCKASGYTFTPNIIHWVRQAPGQGLEWMGWIH | 953 |
| Chain | PGSGAIKYAQKLQGRVTMTTDTSTSTAYMELRSLRSDDTAVYYCARHGGTGR | |
| | GAMDYWGQGTLVTVSSASTKGPSVFPLAPSSKSTSGGTAALGCLVKDYFPEP | |
| | VTVSWNSGALTSGVHTFPAVLQSSGLYSLSSVVTVPSSSLGTQTYICNVNHK | |
| | PSNTKVDKKVEPKSCDKTHTCPPCPAPELLGGPSVFLFPPKPKDTLMISRTP | |
| | EVTCVVVDVSHEDPEVKFNWYVDGVEVHNAKTKPREEQYNSTYRVVSVLTVL | |
| | HQDWLNGKEYKCKVSNKALPAPIEKTISKAKGQPREPQVYTLPPSRDELTKN | |
| | QVSLTCLVKGFYPSDIAVEWESNGQPENNYKTTPPVLDSDGSFFLYSKLTVD | |
| | KSRWQQGNVFSCSVMHEALHNHYTQKSLSLSPGK | |
| Light | EIVLTQSPGTLSLSPGERATLSCRASQSVSTSAYSYMHWYQQKPGQAPRLLI | 954 |
| Chain | YLASNLESGIPDRFSGSGSGTDFTLTISRLEPEDFAVYYCQQSRELPYTFGQ | |
| | GTKLEIKRTVAAPSVFIFPPSDEQLKSGTASVVCLLNNFYPREAKVQWKVDN | |
| | ALQSGNSQESVTEQDSKDSTYSLSSTLTLSKADYEKHKVYACEVTHQGLSSP | |
| | VTKSFNRGEC | |

P28862158

| | | |
|---|---|---|
| Heavy | QVQLVQSGAEVKKPGASVKVSCKASGYTFTQNIIHWVRQAPGQGLEWMGWIH | 955 |
| Chain | PGSGAIKYAQKLQGRVTMTTDTSTSTAYMELRSLRSDDTAVYYCARHGGTGR | |
| | GAMDYWGQGTLVTVSSASTKGPSVFPLAPSSKSTSGGTAALGCLVKDYFPEP | |
| | VTVSWNSGALTSGVHTFPAVLQSSGLYSLSSVVTVPSSSLGTQTYICNVNHK | |
| | PSNTKVDKKVEPKSCDKTHTCPPCPAPELLGGPSVFLFPPKPKDTLMISRTP | |
| | EVTCVVVDVSHEDPEVKFNWYVDGVEVHNAKTKPREEQYNSTYRVVSVLTVL | |
| | HQDWLNGKEYKCKVSNKALPAPIEKTISKAKGQPREPQVYTLPPSRDELTKN | |
| | QVSLTCLVKGFYPSDIAVEWESNGQPENNYKTTPPVLDSDGSFFLYSKLTVD | |
| | KSRWQQGNVFSCSVMHEALHNHYTQKSLSLSPGK | |
| Light | EIVLTQSPGTLSLSPGERATLSCRASQSVSTSAYSYMHWYQQKPGQAPRLLI | 956 |
| Chain | YLASNLESGIPDRFSGSGSGTDFTLTISRLEPEDFAVYYCQQSRELPYTFGQ | |
| | GTKLEIKRTVAAPSVFIFPPSDEQLKSGTASVVCLLNNFYPREAKVQWKVDN | |
| | ALQSGNSQESVTEQDSKDSTYSLSSTLTLSKADYEKHKVYACEVTHQGLSSP | |
| | VTKSFNRGEC | |

P28872158

| | | |
|---|---|---|
| Heavy | QVQLVQSGAEVKKPGASVKVSCKASGYTFTRNIIHWVRQAPGQGLEWMGWIH | 957 |
| Chain | PGSGAIKYAQKLQGRVTMTTDTSTSTAYMELRSLRSDDTAVYYCARHGGTGR | |
| | GAMDYWGQGTLVTVSSASTKGPSVFPLAPSSKSTSGGTAALGCLVKDYFPEP | |
| | VTVSWNSGALTSGVHTFPAVLQSSGLYSLSSVVTVPSSSLGTQTYICNVNHK | |
| | PSNTKVDKKVEPKSCDKTHTCPPCPAPELLGGPSVFLFPPKPKDTLMISRTP | |
| | EVTCVVVDVSHEDPEVKFNWYVDGVEVHNAKTKPREEQYNSTYRVVSVLTVL | |
| | HQDWLNGKEYKCKVSNKALPAPIEKTISKAKGQPREPQVYTLPPSRDELTKN | |
| | QVSLTCLVKGFYPSDIAVEWESNGQPENNYKTTPPVLDSDGSFFLYSKLTVD | |
| | KSRWQQGNVFSCSVMHEALHNHYTQKSLSLSPGK | |
| Light | EIVLTQSPGTLSLSPGERATLSCRASQSVSTSAYSYMHWYQQKPGQAPRLLI | 958 |
| Chain | YLASNLESGIPDRFSGSGSGTDFTLTISRLEPEDFAVYYCQQSRELPYTFGQ | |
| | GTKLEIKRTVAAPSVFIFPPSDEQLKSGTASVVCLLNNFYPREAKVQWKVDN | |
| | ALQSGNSQESVTEQDSKDSTYSLSSTLTLSKADYEKHKVYACEVTHQGLSSP | |
| | VTKSFNRGEC | |

P28882158

| | | |
|---|---|---|
| Heavy | QVQLVQSGAEVKKPGASVKVSCKASGYTFTTNIIHWVRQAPGQGLEWMGWIH | 959 |
| Chain | PGSGAIKYAQKLQGRVTMTTDTSTSTAYMELRSLRSDDTAVYYCARHGGTGR | |
| | GAMDYWGQGTLVTVSSASTKGPSVFPLAPSSKSTSGGTAALGCLVKDYFPEP | |
| | VTVSWNSGALTSGVHTFPAVLQSSGLYSLSSVVTVPSSSLGTQTYICNVNHK | |
| | PSNTKVDKKVEPKSCDKTHTCPPCPAPELLGGPSVFLFPPKPKDTLMISRTP | |
| | EVTCVVVDVSHEDPEVKFNWYVDGVEVHNAKTKPREEQYNSTYRVVSVLTVL | |
| | HQDWLNGKEYKCKVSNKALPAPIEKTISKAKGQPREPQVYTLPPSRDELTKN | |
| | QVSLTCLVKGFYPSDIAVEWESNGQPENNYKTTPPVLDSDGSFFLYSKLTVD | |
| | KSRWQQGNVFSCSVMHEALHNHYTQKSLSLSPGK | |
| Light | EIVLTQSPGTLSLSPGERATLSCRASQSVSTSAYSYMHWYQQKPGQAPRLLI | 960 |
| Chain | YLASNLESGIPDRFSGSGSGTDFTLTISRLEPEDFAVYYCQQSRELPYTFGQ | |
| | GTKLEIKRTVAAPSVFIFPPSDEQLKSGTASVVCLLNNFYPREAKVQWKVDN | |
| | ALQSGNSQESVTEQDSKDSTYSLSSTLTLSKADYEKHKVYACEVTHQGLSSP | |
| | VTKSFNRGEC | |

P28892158

| | | |
|---|---|---|
| Heavy | QVQLVQSGAEVKKPGASVKVSCKASGYTFTVNIIHWVRQAPGQGLEWMGWIH | 961 |
| Chain | PGSGAIKYAQKLQGRVTMTTDTSTSTAYMELRSLRSDDTAVYYCARHGGTGR | |
| | GAMDYWGQGTLVTVSSASTKGPSVFPLAPSSKSTSGGTAALGCLVKDYFPEP | |
| | VTVSWNSGALTSGVHTFPAVLQSSGLYSLSSVVTVPSSSLGTQTYICNVNHK | |
| | PSNTKVDKKVEPKSCDKTHTCPPCPAPELLGGPSVFLFPPKPKDTLMISRTP | |
| | EVTCVVVDVSHEDPEVKFNWYVDGVEVHNAKTKPREEQYNSTYRVVSVLTVL | |
| | HQDWLNGKEYKCKVSNKALPAPIEKTISKAKGQPREPQVYTLPPSRDELTKN | |
| | QVSLTCLVKGFYPSDIAVEWESNGQPENNYKTTPPVLDSDGSFFLYSKLTVD | |
| | KSRWQQGNVFSCSVMHEALHNHYTQKSLSLSPGK | |
| Light | EIVLTQSPGTLSLSPGERATLSCRASQSVSTSAYSYMHWYQQKPGQAPRLLI | 962 |
| Chain | YLASNLESGIPDRFSGSGSGTDFTLTISRLEPEDFAVYYCQQSRELPYTFGQ | |
| | GTKLEIKRTVAAPSVFIFPPSDEQLKSGTASVVCLLNNFYPREAKVQWKVDN | |
| | ALQSGNSQESVTEQDSKDSTYSLSSTLTLSKADYEKHKVYACEVTHQGLSSP | |
| | VTKSFNRGEC | |

P28902158

| | | |
|---|---|---|
| Heavy | QVQLVQSGAEVKKPGASVKVSCKASGYTFTWNIIHWVRQAPGQGLEWMGWIH | 963 |
| Chain | PGSGAIKYAQKLQGRVTMTTDTSTSTAYMELRSLRSDDTAVYYCARHGGTGR | |
| | GAMDYWGQGTLVTVSSASTKGPSVFPLAPSSKSTSGGTAALGCLVKDYFPEP | |
| | VTVSWNSGALTSGVHTFPAVLQSSGLYSLSSVVTVPSSSLGTQTYICNVNHK | |
| | PSNTKVDKKVEPKSCDKTHTCPPCPAPELLGGPSVFLFPPKPKDTLMISRTP | |
| | EVTCVVVDVSHEDPEVKFNWYVDGVEVHNAKTKPREEQYNSTYRVVSVLTVL | |
| | HQDWLNGKEYKCKVSNKALPAPIEKTISKAKGQPREPQVYTLPPSRDELTKN | |
| | QVSLTCLVKGFYPSDIAVEWESNGQPENNYKTTPPVLDSDGSFFLYSKLTVD | |
| | KSRWQQGNVFSCSVMHEALHNHYTQKSLSLSPGK | |
| Light | EIVLTQSPGTLSLSPGERATLSCRASQSVSTSAYSYMHWYQQKPGQAPRLLI | 964 |
| Chain | YLASNLESGIPDRFSGSGSGTDFTLTISRLEPEDFAVYYCQQSRELPYTFGQ | |
| | GTKLEIKRTVAAPSVFIFPPSDEQLKSGTASVVCLLNNFYPREAKVQWKVDN | |
| | ALQSGNSQESVTEQDSKDSTYSLSSTLTLSKADYEKHKVYACEVTHQGLSSP | |
| | VTKSFNRGEC | |

P28912158

| | | |
|---|---|---|
| Heavy | QVQLVQSGAEVKKPGASVKVSCKASGYTFTYNIIHWVRQAPGQGLEWMGWIH | 965 |
| Chain | PGSGAIKYAQKLQGRVTMTTDTSTSTAYMELRSLRSDDTAVYYCARHGGTGR | |
| | GAMDYWGQGTLVTVSSASTKGPSVFPLAPSSKSTSGGTAALGCLVKDYFPEP | |
| | VTVSWNSGALTSGVHTFPAVLQSSGLYSLSSVVTVPSSSLGTQTYICNVNHK | |
| | PSNTKVDKKVEPKSCDKTHTCPPCPAPELLGGPSVFLFPPKPKDTLMISRTP | |
| | EVTCVVVDVSHEDPEVKFNWYVDGVEVHNAKTKPREEQYNSTYRVVSVLTVL | |
| | HQDWLNGKEYKCKVSNKALPAPIEKTISKAKGQPREPQVYTLPPSRDELTKN | |
| | QVSLTCLVKGFYPSDIAVEWESNGQPENNYKTTPPVLDSDGSFFLYSKLTVD | |
| | KSRWQQGNVFSCSVMHEALHNHYTQKSLSLSPGK | |
| Light | EIVLTQSPGTLSLSPGERATLSCRASQSVSTSAYSYMHWYQQKPGQAPRLLI | 966 |
| Chain | YLASNLESGIPDRFSGSGSGTDFTLTISRLEPEDFAVYYCQQSRELPYTFGQ | |
| | GTKLEIKRTVAAPSVFIFPPSDEQLKSGTASVVCLLNNFYPREAKVQWKVDN | |
| | ALQSGNSQESVTEQDSKDSTYSLSSTLTLSKADYEKHKVYACEVTHQGLSSP | |
| | VTKSFNRGEC | |

P28922158

| | | |
|---|---|---|
| Heavy | QVQLVQSGAEVKKPGASVKVSCKASGYTFTSNIIHWVRQAPGQGLEWMGWIH | 967 |
| Chain | PGSGDIKYAQKLQGRVTMTTDTSTSTAYMELRSLRSDDTAVYYCARHGGTGR | |
| | GAMDYWGQGTLVTVSSASTKGPSVFPLAPSSKSTSGGTAALGCLVKDYFPEP | |
| | VTVSWNSGALTSGVHTFPAVLQSSGLYSLSSVVTVPSSSLGTQTYICNVNHK | |
| | PSNTKVDKKVEPKSCDKTHTCPPCPAPELLGGPSVFLFPPKPKDTLMISRTP | |
| | EVTCVVVDVSHEDPEVKFNWYVDGVEVHNAKTKPREEQYNSTYRVVSVLTVL | |
| | HQDWLNGKEYKCKVSNKALPAPIEKTISKAKGQPREPQVYTLPPSRDELTKN | |
| | QVSLTCLVKGFYPSDIAVEWESNGQPENNYKTTPPVLDSDGSFFLYSKLTVD | |
| | KSRWQQGNVFSCSVMHEALHNHYTQKSLSLSPGK | |
| Light | EIVLTQSPGTLSLSPGERATLSCRASQSVSTSAYSYMHWYQQKPGQAPRLLI | 968 |
| Chain | YLASNLESGIPDRFSGSGSGTDFTLTISRLEPEDFAVYYCQQSRELPYTFGQ | |
| | GTKLEIKRTVAAPSVFIFPPSDEQLKSGTASVVCLLNNFYPREAKVQWKVDN | |
| | ALQSGNSQESVTEQDSKDSTYSLSSTLTLSKADYEKHKVYACEVTHQGLSSP | |
| | VTKSFNRGEC | |

P28932158

| | | |
|---|---|---|
| Heavy | QVQLVQSGAEVKKPGASVKVSCKASGYTFTSNIIHWVRQAPGQGLEWMGWIH | 969 |
| Chain | PGSGEIKYAQKLQGRVTMTTDTSTSTAYMELRSLRSDDTAVYYCARHGGTGR | |
| | GAMDYWGQGTLVTVSSASTKGPSVFPLAPSSKSTSGGTAALGCLVKDYFPEP | |
| | VTVSWNSGALTSGVHTFPAVLQSSGLYSLSSVVTVPSSSLGTQTYICNVNHK | |
| | PSNTKVDKKVEPKSCDKTHTCPPCPAPELLGGPSVFLFPPKPKDTLMISRTP | |
| | EVTCVVVDVSHEDPEVKFNWYVDGVEVHNAKTKPREEQYNSTYRVVSVLTVL | |
| | HQDWLNGKEYKCKVSNKALPAPIEKTISKAKGQPREPQVYTLPPSRDELTKN | |
| | QVSLTCLVKGFYPSDIAVEWESNGQPENNYKTTPPVLDSDGSFFLYSKLTVD | |
| | KSRWQQGNVFSCSVMHEALHNHYTQKSLSLSPGK | |
| Light | EIVLTQSPGTLSLSPGERATLSCRASQSVSTSAYSYMHWYQQKPGQAPRLLI | 970 |
| Chain | YLASNLESGIPDRFSGSGSGTDFTLTISRLEPEDFAVYYCQQSRELPYTFGQ | |
| | GTKLEIKRTVAAPSVFIFPPSDEQLKSGTASVVCLLNNFYPREAKVQWKVDN | |
| | ALQSGNSQESVTEQDSKDSTYSLSSTLTLSKADYEKHKVYACEVTHQGLSSP | |
| | VTKSFNRGEC | |

P28942158

| | | |
|---|---|---|
| Heavy | QVQLVQSGAEVKKPGASVKVSCKASGYTFTSNIIHWVRQAPGQGLEWMGWIH | 971 |
| Chain | PGSGFIKYAQKLQGRVTMTTDTSTSTAYMELRSLRSDDTAVYYCARHGGTGR | |
| | GAMDYWGQGTLVTVSSASTKGPSVFPLAPSSKSTSGGTAALGCLVKDYFPEP | |
| | VTVSWNSGALTSGVHTFPAVLQSSGLYSLSSVVTVPSSSLGTQTYICNVNHK | |
| | PSNTKVDKKVEPKSCDKTHTCPPCPAPELLGGPSVFLFPPKPKDTLMISRTP | |
| | EVTCVVVDVSHEDPEVKFNWYVDGVEVHNAKTKPREEQYNSTYRVVSVLTVL | |
| | HQDWLNGKEYKCKVSNKALPAPIEKTISKAKGQPREPQVYTLPPSRDELTKN | |
| | QVSLTCLVKGFYPSDIAVEWESNGQPENNYKTTPPVLDSDGSFFLYSKLTVD | |
| | KSRWQQGNVFSCSVMHEALHNHYTQKSLSLSPGK | |
| Light | EIVLTQSPGTLSLSPGERATLSCRASQSVSTSAYSYMHWYQQKPGQAPRLLI | 972 |
| Chain | YLASNLESGIPDRFSGSGSGTDFTLTISRLEPEDFAVYYCQQSRELPYTFGQ | |
| | GTKLEIKRTVAAPSVFIFPPSDEQLKSGTASVVCLLNNFYPREAKVQWKVDN | |
| | ALQSGNSQESVTEQDSKDSTYSLSSTLTLSKADYEKHKVYACEVTHQGLSSP | |
| | VTKSFNRGEC | |

P28952158

| | | |
|---|---|---|
| Heavy | QVQLVQSGAEVKKPGASVKVSCKASGYTFTSNIIHWVRQAPGQGLEWMGWIH | 973 |
| Chain | PGSGGIKYAQKLQGRVTMTTDTSTSTAYMELRSLRSDDTAVYYCARHGGTGR | |
| | GAMDYWGQGTLVTVSSASTKGPSVFPLAPSSKSTSGGTAALGCLVKDYFPEP | |
| | VTVSWNSGALTSGVHTFPAVLQSSGLYSLSSVVTVPSSSLGTQTYICNVNHK | |
| | PSNTKVDKKVEPKSCDKTHTCPPCPAPELLGGPSVFLFPPKPKDTLMISRTP | |
| | EVTCVVVDVSHEDPEVKFNWYVDGVEVHNAKTKPREEQYNSTYRVVSVLTVL | |
| | HQDWLNGKEYKCKVSNKALPAPIEKTISKAKGQPREPQVYTLPPSRDELTKN | |
| | QVSLTCLVKGFYPSDIAVEWESNGQPENNYKTTPPVLDSDGSFFLYSKLTVD | |
| | KSRWQQGNVFSCSVMHEALHNHYTQKSLSLSPGK | |
| Light | EIVLTQSPGTLSLSPGERATLSCRASQSVSTSAYSYMHWYQQKPGQAPRLLI | 974 |
| Chain | YLASNLESGIPDRFSGSGSGTDFTLTISRLEPEDFAVYYCQQSRELPYTFGQ | |
| | GTKLEIKRTVAAPSVFIFPPSDEQLKSGTASVVCLLNNFYPREAKVQWKVDN | |
| | ALQSGNSQESVTEQDSKDSTYSLSSTLTLSKADYEKHKVYACEVTHQGLSSP | |
| | VTKSFNRGEC | |

P28962158

| | | |
|---|---|---|
| Heavy | QVQLVQSGAEVKKPGASVKVSCKASGYTFTSNIIHWVRQAPGQGLEWMGWIH | 975 |
| Chain | PGSGHIKYAQKLQGRVTMTTDTSTSTAYMELRSLRSDDTAVYYCARHGGTGR | |
| | GAMDYWGQGTLVTVSSASTKGPSVFPLAPSSKSTSGGTAALGCLVKDYFPEP | |
| | VTVSWNSGALTSGVHTFPAVLQSSGLYSLSSVVTVPSSSLGTQTYICNVNHK | |
| | PSNTKVDKKVEPKSCDKTHTCPPCPAPELLGGPSVFLFPPKPKDTLMISRTP | |
| | EVTCVVVDVSHEDPEVKFNWYVDGVEVHNAKTKPREEQYNSTYRVVSVLTVL | |
| | HQDWLNGKEYKCKVSNKALPAPIEKTISKAKGQPREPQVYTLPPSRDELTKN | |
| | QVSLTCLVKGFYPSDIAVEWESNGQPENNYKTTPPVLDSDGSFFLYSKLTVD | |
| | KSRWQQGNVFSCSVMHEALHNHYTQKSLSLSPGK | |
| Light | EIVLTQSPGTLSLSPGERATLSCRASQSVSTSAYSYMHWYQQKPGQAPRLLI | 976 |
| Chain | YLASNLESGIPDRFSGSGSGTDFTLTISRLEPEDFAVYYCQQSRELPYTFGQ | |
| | GTKLEIKRTVAAPSVFIFPPSDEQLKSGTASVVCLLNNFYPREAKVQWKVDN | |
| | ALQSGNSQESVTEQDSKDSTYSLSSTLTLSKADYEKHKVYACEVTHQGLSSP | |
| | VTKSFNRGEC | |

P28972158

| | | |
|---|---|---|
| Heavy | QVQLVQSGAEVKKPGASVKVSCKASGYTFTSNIIHWVRQAPGQGLEWMGWIH | 977 |
| Chain | PGSGIIKYAQKLQGRVTMTTDTSTSTAYMELRSLRSDDTAVYYCARHGGTGR | |
| | GAMDYWGQGTLVTVSSASTKGPSVFPLAPSSKSTSGGTAALGCLVKDYFPEP | |
| | VTVSWNSGALTSGVHTFPAVLQSSGLYSLSSVVTVPSSSLGTQTYICNVNHK | |
| | PSNTKVDKKVEPKSCDKTHTCPPCPAPELLGGPSVFLFPPKPKDTLMISRTP | |
| | EVTCVVVDVSHEDPEVKFNWYVDGVEVHNAKTKPREEQYNSTYRVVSVLTVL | |
| | HQDWLNGKEYKCKVSNKALPAPIEKTISKAKGQPREPQVYTLPPSRDELTKN | |
| | QVSLTCLVKGFYPSDIAVEWESNGQPENNYKTTPPVLDSDGSFFLYSKLTVD | |
| | KSRWQQGNVFSCSVMHEALHNHYTQKSLSLSPGK | |
| Light | EIVLTQSPGTLSLSPGERATLSCRASQSVSTSAYSYMHWYQQKPGQAPRLLI | 978 |
| Chain | YLASNLESGIPDRFSGSGSGTDFTLTISRLEPEDFAVYYCQQSRELPYTFGQ | |
| | GTKLEIKRTVAAPSVFIFPPSDEQLKSGTASVVCLLNNFYPREAKVQWKVDN | |
| | ALQSGNSQESVTEQDSKDSTYSLSSTLTLSKADYEKHKVYACEVTHQGLSSP | |
| | VTKSFNRGEC | |

P28982158

| | | |
|---|---|---|
| Heavy | QVQLVQSGAEVKKPGASVKVSCKASGYTFTSNIIHWVRQAPGQGLEWMGWIH | 979 |
| Chain | PGSGKIKYAQKLQGRVTMTTDTSTSTAYMELRSLRSDDTAVYYCARHGGTGR | |
| | GAMDYWGQGTLVTVSSASTKGPSVFPLAPSSKSTSGGTAALGCLVKDYFPEP | |
| | VTVSWNSGALTSGVHTFPAVLQSSGLYSLSSVVTVPSSSLGTQTYICNVNHK | |
| | PSNTKVDKKVEPKSCDKTHTCPPCPAPELLGGPSVFLFPPKPKDTLMISRTP | |
| | EVTCVVVDVSHEDPEVKFNWYVDGVEVHNAKTKPREEQYNSTYRVVSVLTVL | |
| | HQDWLNGKEYKCKVSNKALPAPIEKTISKAKGQPREPQVYTLPPSRDELTKN | |
| | QVSLTCLVKGFYPSDIAVEWESNGQPENNYKTTPPVLDSDGSFFLYSKLTVD | |
| | KSRWQQGNVFSCSVMHEALHNHYTQKSLSLSPGK | |
| Light | EIVLTQSPGTLSLSPGERATLSCRASQSVSTSAYSYMHWYQQKPGQAPRLLI | 980 |
| Chain | YLASNLESGIPDRFSGSGSGTDFTLTISRLEPEDFAVYYCQQSRELPYTFGQ | |
| | GTKLEIKRTVAAPSVFIFPPSDEQLKSGTASVVCLLNNFYPREAKVQWKVDN | |
| | ALQSGNSQESVTEQDSKDSTYSLSSTLTLSKADYEKHKVYACEVTHQGLSSP | |
| | VTKSFNRGEC | |

P28992158

| | | |
|---|---|---|
| Heavy | QVQLVQSGAEVKKPGASVKVSCKASGYTFTSNIIHWVRQAPGQGLEWMGWIH | 981 |
| Chain | PGSGLIKYAQKLQGRVTMTTDTSTSTAYMELRSLRSDDTAVYYCARHGGTGR | |
| | GAMDYWGQGTLVTVSSASTKGPSVFPLAPSSKSTSGGTAALGCLVKDYFPEP | |
| | VTVSWNSGALTSGVHTFPAVLQSSGLYSLSSVVTVPSSSLGTQTYICNVNHK | |
| | PSNTKVDKKVEPKSCDKTHTCPPCPAPELLGGPSVFLFPPKPKDTLMISRTP | |
| | EVTCVVVDVSHEDPEVKFNWYVDGVEVHNAKTKPREEQYNSTYRVVSVLTVL | |
| | HQDWLNGKEYKCKVSNKALPAPIEKTISKAKGQPREPQVYTLPPSRDELTKN | |
| | QVSLTCLVKGFYPSDIAVEWESNGQPENNYKTTPPVLDSDGSFFLYSKLTVD | |
| | KSRWQQGNVFSCSVMHEALHNHYTQKSLSLSPGK | |
| Light | EIVLTQSPGTLSLSPGERATLSCRASQSVSTSAYSYMHWYQQKPGQAPRLLI | 982 |
| Chain | YLASNLESGIPDRFSGSGSGTDFTLTISRLEPEDFAVYYCQQSRELPYTFGQ | |
| | GTKLEIKRTVAAPSVFIFPPSDEQLKSGTASVVCLLNNFYPREAKVQWKVDN | |
| | ALQSGNSQESVTEQDSKDSTYSLSSTLTLSKADYEKHKVYACEVTHQGLSSP | |
| | VTKSFNRGEC | |

P29002158

| | | |
|---|---|---|
| Heavy | QVQLVQSGAEVKKPGASVKVSCKASGYTFTSNIIHWVRQAPGQGLEWMGWIH | 983 |
| Chain | PGSGMIKYAQKLQGRVTMTTDTSTSTAYMELRSLRSDDTAVYYCARHGGTGR | |
| | GAMDYWGQGTLVTVSSASTKGPSVFPLAPSSKSTSGGTAALGCLVKDYFPEP | |
| | VTVSWNSGALTSGVHTFPAVLQSSGLYSLSSVVTVPSSSLGTQTYICNVNHK | |
| | PSNTKVDKKVEPKSCDKTHTCPPCPAPELLGGPSVFLFPPKPKDTLMISRTP | |
| | EVTCVVVDVSHEDPEVKFNWYVDGVEVHNAKTKPREEQYNSTYRVVSVLTVL | |
| | HQDWLNGKEYKCKVSNKALPAPIEKTISKAKGQPREPQVYTLPPSRDELTKN | |
| | QVSLTCLVKGFYPSDIAVEWESNGQPENNYKTTPPVLDSDGSFFLYSKLTVD | |
| | KSRWQQGNVFSCSVMHEALHNHYTQKSLSLSPGK | |
| Light | EIVLTQSPGTLSLSPGERATLSCRASQSVSTSAYSYMHWYQQKPGQAPRLLI | 984 |
| Chain | YLASNLESGIPDRFSGSGSGTDFTLTISRLEPEDFAVYYCQQSRELPYTFGQ | |
| | GTKLEIKRTVAAPSVFIFPPSDEQLKSGTASVVCLLNNFYPREAKVQWKVDN | |
| | ALQSGNSQESVTEQDSKDSTYSLSSTLTLSKADYEKHKVYACEVTHQGLSSP | |
| | VTKSFNRGEC | |

P29012158

| | | |
|---|---|---|
| Heavy | QVQLVQSGAEVKKPGASVKVSCKASGYTFTSNIIHWVRQAPGQGLEWMGWIH | 985 |
| Chain | PGSGNIKYAQKLQGRVTMTTDTSTSTAYMELRSLRSDDTAVYYCARHGGTGR | |
| | GAMDYWGQGTLVTVSSASTKGPSVFPLAPSSKSTSGGTAALGCLVKDYFPEP | |
| | VTVSWNSGALTSGVHTFPAVLQSSGLYSLSSVVTVPSSSLGTQTYICNVNHK | |
| | PSNTKVDKKVEPKSCDKTHTCPPCPAPELLGGPSVFLFPPKPKDTLMISRTP | |
| | EVTCVVVDVSHEDPEVKFNWYVDGVEVHNAKTKPREEQYNSTYRVVSVLTVL | |
| | HQDWLNGKEYKCKVSNKALPAPIEKTISKAKGQPREPQVYTLPPSRDELTKN | |
| | QVSLTCLVKGFYPSDIAVEWESNGQPENNYKTTPPVLDSDGSFFLYSKLTVD | |
| | KSRWQQGNVFSCSVMHEALHNHYTQKSLSLSPGK | |
| Light | EIVLTQSPGTLSLSPGERATLSCRASQSVSTSAYSYMHWYQQKPGQAPRLLI | 986 |
| Chain | YLASNLESGIPDRFSGSGSGTDFTLTISRLEPEDFAVYYCQQSRELPYTFGQ | |
| | GTKLEIKRTVAAPSVFIFPPSDEQLKSGTASVVCLLNNFYPREAKVQWKVDN | |
| | ALQSGNSQESVTEQDSKDSTYSLSSTLTLSKADYEKHKVYACEVTHQGLSSP | |
| | VTKSFNRGEC | |

P29022158

| | | |
|---|---|---|
| Heavy | QVQLVQSGAEVKKPGASVKVSCKASGYTFTSNIIHWVRQAPGQGLEWMGWIH | 987 |
| Chain | PGSGPIKYAQKLQGRVTMTTDTSTSTAYMELRSLRSDDTAVYYCARHGGTGR | |
| | GAMDYWGQGTLVTVSSASTKGPSVFPLAPSSKSTSGGTAALGCLVKDYFPEP | |
| | VTVSWNSGALTSGVHTFPAVLQSSGLYSLSSVVTVPSSSLGTQTYICNVNHK | |
| | PSNTKVDKKVEPKSCDKTHTCPPCPAPELLGGPSVFLFPPKPKDTLMISRTP | |
| | EVTCVVVDVSHEDPEVKFNWYVDGVEVHNAKTKPREEQYNSTYRVVSVLTVL | |
| | HQDWLNGKEYKCKVSNKALPAPIEKTISKAKGQPREPQVYTLPPSRDELTKN | |
| | QVSLTCLVKGFYPSDIAVEWESNGQPENNYKTTPPVLDSDGSFFLYSKLTVD | |
| | KSRWQQGNVFSCSVMHEALHNHYTQKSLSLSPGK | |
| Light | EIVLTQSPGTLSLSPGERATLSCRASQSVSTSAYSYMHWYQQKPGQAPRLLI | 988 |
| Chain | YLASNLESGIPDRFSGSGSGTDFTLTISRLEPEDFAVYYCQQSRELPYTFGQ | |
| | GTKLEIKRTVAAPSVFIFPPSDEQLKSGTASVVCLLNNFYPREAKVQWKVDN | |
| | ALQSGNSQESVTEQDSKDSTYSLSSTLTLSKADYEKHKVYACEVTHQGLSSP | |
| | VTKSFNRGEC | |

P29032158

| | | |
|---|---|---|
| Heavy | QVQLVQSGAEVKKPGASVKVSCKASGYTFTSNIIHWVRQAPGQGLEWMGWIH | 989 |
| Chain | PGSGQIKYAQKLQGRVTMTTDTSTSTAYMELRSLRSDDTAVYYCARHGGTGR | |
| | GAMDYWGQGTLVTVSSASTKGPSVFPLAPSSKSTSGGTAALGCLVKDYFPEP | |
| | VTVSWNSGALTSGVHTFPAVLQSSGLYSLSSVVTVPSSSLGTQTYICNVNHK | |
| | PSNTKVDKKVEPKSCDKTHTCPPCPAPELLGGPSVFLFPPKPKDTLMISRTP | |
| | EVTCVVVDVSHEDPEVKFNWYVDGVEVHNAKTKPREEQYNSTYRVVSVLTVL | |
| | HQDWLNGKEYKCKVSNKALPAPIEKTISKAKGQPREPQVYTLPPSRDELTKN | |
| | QVSLTCLVKGFYPSDIAVEWESNGQPENNYKTTPPVLDSDGSFFLYSKLTVD | |
| | KSRWQQGNVFSCSVMHEALHNHYTQKSLSLSPGK | |
| Light | EIVLTQSPGTLSLSPGERATLSCRASQSVSTSAYSYMHWYQQKPGQAPRLLI | 990 |
| Chain | YLASNLESGIPDRFSGSGSGTDFTLTISRLEPEDFAVYYCQQSRELPYTFGQ | |
| | GTKLEIKRTVAAPSVFIFPPSDEQLKSGTASVVCLLNNFYPREAKVQWKVDN | |
| | ALQSGNSQESVTEQDSKDSTYSLSSTLTLSKADYEKHKVYACEVTHQGLSSP | |
| | VTKSFNRGEC | |

P29042158

| | | |
|---|---|---|
| Heavy | QVQLVQSGAEVKKPGASVKVSCKASGYTFTSNIIHWVRQAPGQGLEWMGWIH | 991 |
| Chain | PGSGRIKYAQKLQGRVTMTTDTSTSTAYMELRSLRSDDTAVYYCARHGGTGR | |
| | GAMDYWGQGTLVTVSSASTKGPSVFPLAPSSKSTSGGTAALGCLVKDYFPEP | |
| | VTVSWNSGALTSGVHTFPAVLQSSGLYSLSSVVTVPSSSLGTQTYICNVNHK | |
| | PSNTKVDKKVEPKSCDKTHTCPPCPAPELLGGPSVFLFPPKPKDTLMISRTP | |
| | EVTCVVVDVSHEDPEVKFNWYVDGVEVHNAKTKPREEQYNSTYRVVSVLTVL | |
| | HQDWLNGKEYKCKVSNKALPAPIEKTISKAKGQPREPQVYTLPPSRDELTKN | |
| | QVSLTCLVKGFYPSDIAVEWESNGQPENNYKTTPPVLDSDGSFFLYSKLTVD | |
| | KSRWQQGNVFSCSVMHEALHNHYTQKSLSLSPGK | |
| Light | EIVLTQSPGTLSLSPGERATLSCRASQSVSTSAYSYMHWYQQKPGQAPRLLI | 992 |
| Chain | YLASNLESGIPDRFSGSGSGTDFTLTISRLEPEDFAVYYCQQSRELPYTFGQ | |
| | GTKLEIKRTVAAPSVFIFPPSDEQLKSGTASVVCLLNNFYPREAKVQWKVDN | |
| | ALQSGNSQESVTEQDSKDSTYSLSSTLTLSKADYEKHKVYACEVTHQGLSSP | |
| | VTKSFNRGEC | |

P29052158

| | | |
|---|---|---|
| Heavy | QVQLVQSGAEVKKPGASVKVSCKASGYTFTSNIIHWVRQAPGQGLEWMGWIH | 993 |
| Chain | PGSGTIKYAQKLQGRVTMTTDTSTSTAYMELRSLRSDDTAVYYCARHGGTGR | |
| | GAMDYWGQGTLVTVSSASTKGPSVFPLAPSSKSTSGGTAALGCLVKDYFPEP | |
| | VTVSWNSGALTSGVHTFPAVLQSSGLYSLSSVVTVPSSSLGTQTYICNVNHK | |
| | PSNTKVDKKVEPKSCDKTHTCPPCPAPELLGGPSVFLFPPKPKDTLMISRTP | |
| | EVTCVVVDVSHEDPEVKFNWYVDGVEVHNAKTKPREEQYNSTYRVVSVLTVL | |
| | HQDWLNGKEYKCKVSNKALPAPIEKTISKAKGQPREPQVYTLPPSRDELTKN | |
| | QVSLTCLVKGFYPSDIAVEWESNGQPENNYKTTPPVLDSDGSFFLYSKLTVD | |
| | KSRWQQGNVFSCSVMHEALHNHYTQKSLSLSPGK | |
| Light | EIVLTQSPGTLSLSPGERATLSCRASQSVSTSAYSYMHWYQQKPGQAPRLLI | 994 |
| Chain | YLASNLESGIPDRFSGSGSGTDFTLTISRLEPEDFAVYYCQQSRELPYTFGQ | |
| | GTKLEIKRTVAAPSVFIFPPSDEQLKSGTASVVCLLNNFYPREAKVQWKVDN | |
| | ALQSGNSQESVTEQDSKDSTYSLSSTLTLSKADYEKHKVYACEVTHQGLSSP | |
| | VTKSFNRGEC | |

P29062158

| | | |
|---|---|---|
| Heavy | QVQLVQSGAEVKKPGASVKVSCKASGYTFTSNIIHWVRQAPGQGLEWMGWIH | 995 |
| Chain | PGSGVIKYAQKLQGRVTMTTDTSTSTAYMELRSLRSDDTAVYYCARHGGTGR | |
| | GAMDYWGQGTLVTVSSASTKGPSVFPLAPSSKSTSGGTAALGCLVKDYFPEP | |
| | VTVSWNSGALTSGVHTFPAVLQSSGLYSLSSVVTVPSSSLGTQTYICNVNHK | |
| | PSNTKVDKKVEPKSCDKTHTCPPCPAPELLGGPSVFLFPPKPKDTLMISRTP | |
| | EVTCVVVDVSHEDPEVKFNWYVDGVEVHNAKTKPREEQYNSTYRVVSVLTVL | |
| | HQDWLNGKEYKCKVSNKALPAPIEKTISKAKGQPREPQVYTLPPSRDELTKN | |
| | QVSLTCLVKGFYPSDIAVEWESNGQPENNYKTTPPVLDSDGSFFLYSKLTVD | |
| | KSRWQQGNVFSCSVMHEALHNHYTQKSLSLSPGK | |
| Light | EIVLTQSPGTLSLSPGERATLSCRASQSVSTSAYSYMHWYQQKPGQAPRLLI | 996 |
| Chain | YLASNLESGIPDRFSGSGSGTDFTLTISRLEPEDFAVYYCQQSRELPYTFGQ | |
| | GTKLEIKRTVAAPSVFIFPPSDEQLKSGTASVVCLLNNFYPREAKVQWKVDN | |
| | ALQSGNSQESVTEQDSKDSTYSLSSTLTLSKADYEKHKVYACEVTHQGLSSP | |
| | VTKSFNRGEC | |

P29072158

| | | |
|---|---|---|
| Heavy | QVQLVQSGAEVKKPGASVKVSCKASGYTFTSNIIHWVRQAPGQGLEWMGWIH | 997 |
| Chain | PGSGWIKYAQKLQGRVTMTTDTSTSTAYMELRSLRSDDTAVYYCARHGGTGR | |
| | GAMDYWGQGTLVTVSSASTKGPSVFPLAPSSKSTSGGTAALGCLVKDYFPEP | |
| | VTVSWNSGALTSGVHTFPAVLQSSGLYSLSSVVTVPSSSLGTQTYICNVNHK | |
| | PSNTKVDKKVEPKSCDKTHTCPPCPAPELLGGPSVFLFPPKPKDTLMISRTP | |
| | EVTCVVVDVSHEDPEVKFNWYVDGVEVHNAKTKPREEQYNSTYRVVSVLTVL | |
| | HQDWLNGKEYKCKVSNKALPAPIEKTISKAKGQPREPQVYTLPPSRDELTKN | |
| | QVSLTCLVKGFYPSDIAVEWESNGQPENNYKTTPPVLDSDGSFFLYSKLTVD | |
| | KSRWQQGNVFSCSVMHEALHNHYTQKSLSLSPGK | |
| Light | EIVLTQSPGTLSLSPGERATLSCRASQSVSTSAYSYMHWYQQKPGQAPRLLI | 998 |
| Chain | YLASNLESGIPDRFSGSGSGTDFTLTISRLEPEDFAVYYCQQSRELPYTFGQ | |
| | GTKLEIKRTVAAPSVFIFPPSDEQLKSGTASVVCLLNNFYPREAKVQWKVDN | |
| | ALQSGNSQESVTEQDSKDSTYSLSSTLTLSKADYEKHKVYACEVTHQGLSSP | |
| | VTKSFNRGEC | |

P29082158

| | | |
|---|---|---|
| Heavy | QVQLVQSGAEVKKPGASVKVSCKASGYTFTSNIIHWVRQAPGQGLEWMGWIH | 999 |
| Chain | PGSGYIKYAQKLQGRVTMTTDTSTSTAYMELRSLRSDDTAVYYCARHGGTGR | |
| | GAMDYWGQGTLVTVSSASTKGPSVFPLAPSSKSTSGGTAALGCLVKDYFPEP | |
| | VTVSWNSGALTSGVHTFPAVLQSSGLYSLSSVVTVPSSSLGTQTYICNVNHK | |
| | PSNTKVDKKVEPKSCDKTHTCPPCPAPELLGGPSVFLFPPKPKDTLMISRTP | |
| | EVTCVVVDVSHEDPEVKFNWYVDGVEVHNAKTKPREEQYNSTYRVVSVLTVL | |
| | HQDWLNGKEYKCKVSNKALPAPIEKTISKAKGQPREPQVYTLPPSRDELTKN | |
| | QVSLTCLVKGFYPSDIAVEWESNGQPENNYKTTPPVLDSDGSFFLYSKLTVD | |
| | KSRWQQGNVFSCSVMHEALHNHYTQKSLSLSPGK | |
| Light | EIVLTQSPGTLSLSPGERATLSCRASQSVSTSAYSYMHWYQQKPGQAPRLLI | 1000 |
| Chain | YLASNLESGIPDRFSGSGSGTDFTLTISRLEPEDFAVYYCQQSRELPYTFGQ | |
| | GTKLEIKRTVAAPSVFIFPPSDEQLKSGTASVVCLLNNFYPREAKVQWKVDN | |
| | ALQSGNSQESVTEQDSKDSTYSLSSTLTLSKADYEKHKVYACEVTHQGLSSP | |
| | VTKSFNRGEC | |

P14441446

| | | |
|---|---|---|
| Heavy | QVQLKQSGAELVKPGASVKLSCKTSGYTFTENIIHWVKQRSGQGLEWIGWFH | 1001 |
| Chain | PGSGSIKYNEKFKDKATLTADKSSSTVYMELSRLTSEDSAVYFCARHGGTGR | |
| | GAMDYWGQGTSVTVSSAKTTAPSVYPLAPVCGDTTGSSVTLGCLVKGYFPEP | |
| | VTLTWNSGSLSSGVHTFPAVLQSDLYTLSSSVTVTSSTWPSQSITCNVAHPA | |
| | SSTKVDKKIEPRGPTIKPCPPCKCPAPNLLGGPSVFIFPPKIKDVLMISLSP | |
| | IVTCVVVDVSEDDPDVQISWFVNNVEVHTAQTQTHREDYNSTLRVVSALPIQ | |
| | HQDWMSGKEFKCKVNNKDLPAPIERTISKPKGSVRAPQVYVLPPPEEEMTKK | |
| | QVTLTCMVTDFMPEDIYVEWTNNGKTELNYKNTEPVLDSDGSYFMYSKLRVE | |
| | KKNWVERNSYSCSVVHEGLHNHHTTKSFSRTPGK | |
| Light | DILMTQSPASSVVSLGQRATISCRASKSVSTSAYSYMHWYQQKPGQPPKLLI | 1002 |
| Chain | YLASNLESGVPPRFSGSGSGTDFTLNIHPVEEEDAATYYCQHSRELPYTFGG | |
| | GTKLEIKRADAAPTVSIFPPSSEQLTSGGASVVCFLNNFYPKDINVKWKIDG | |
| | SERQNGVLNSWTDQDSKDSTYSMSSTLTLTKDEYERHNSYTCEATHKTSTSP | |
| | IVKSFNRNEC | |

P14511453

| | | |
|---|---|---|
| Heavy | QVQLKQSGAELVKPGASVKLSCKTSGYTFTENIIHWVKQRSGQGLEWIGWFH | 1003 |
| Chain | PGSGSIKYNEKFKDRVTMTADTSTSTVYMELSSLRSEDTAVYYCARHGGTGR | |
| | GAMDYWGQGTLVTVSSASTKGPSVFPLAPSSKSTSGGTAALGCLVKDYFPEP | |
| | VTVSWNSGALTSGVHTFPAVLQSSGLYSLSSVVTVPSSSLGTQTYICNVNHK | |
| | PSNTKVDKKVEPKSCDKTHTCPPCPAPELLGGPSVFLFPPKPKDTLMISRTP | |
| | EVTCVVVDVSHEDPEVKFNWYVDGVEVHNAKTKPREEQYNSTYRVVSVLTVL | |
| | HQDWLNGKEYKCKVSNKALPAPIEKTISKAKGQPREPQVYTLPPSRDELTKN | |
| | QVSLTCLVKGFYPSDIAVEWESNGQPENNYKTTPPVLDSDGSFFLYSKLTVD | |
| | KSRWQQGNVFSCSVMHEALHNHYTQKSLSLSPGK | |
| Light | DIQMTQSPSSLSASVGDRVTITCRASKSVSTSAYSYMHWYQQKPGKAPKLLI | 1004 |
| Chain | YLASNLESGVPSRFSGSGSGTDFTLTISSLQPEDFATYYCQHSRELPYTFGQ | |
| | GTKLEIKRTVAAPSVFIFPPSDEQLKSGTASVVCLLNNFYPREAKVQWKVDN | |
| | ALQSGNSQESVTEQDSKDSTYSLSSTLTLSKADYEKHKVYACEVTHQGLSSP | |
| | VTKSFNRGEC | |

P15611563

| | | |
|---|---|---|
| Heavy | EVQLLESGGGLVQPGGSLRLSCAASGFTFSSYAMSWVRQAPGKGLEWVSAII | 1005 |
| Chain | GSGASTYYADSVKGRFTISRDNSKNTLYLQMNSLRAEDTAVYYCAKGWFGGF | |
| | NYWGQGTLVTVSSASTKGPSVFPLAPSSKSTSGGTAALGCLVKDYFPEPVTV | |
| | SWNSGALTSGVHTFPAVLQSSGLYSLSSVVTVPSSSLGTQTYICNVNHKPSN | |
| | TKVDKKVEPKSCDKTHTCPPCPAPELLGGPSVFLFPPKPKDTLMISRTPEVT | |
| | CVVVDVSHEDPEVKFNWYVDGVEVHNAKTKPREEQYNSTYRVVSVLTVLHQD | |
| | WLNGKEYKCKVSNKALPAPIEKTISKAKGQPREPQVYTLPPSRDELTKNQVS | |
| | LTCLVKGFYPSDIAVEWESNGQPENNYKTTPPVLDSDGSFFLYSKLTVDKSR | |
| | WQQGNVFSCSVMHEALHNHYTQKSLSLSPGK | |
| Light | EIVLTQSPGTLSLSPGERATLSCRASQSVTSSYLAWYQQKPGQAPRLLINVG | 1006 |
| Chain | SRRATGIPDRFSGSGSGTDFTLTISRLEPEDFAVYYCQQGIMLPPTFGQGTK | |
| | VEIKRTVAAPSVFIFPPSDEQLKSGTASVVCLLNNFYPREAKVQWKVDNALQ | |
| | SGNSQESVTEQDSKDSTYSLSSTLTLSKADYEKHKVYACEVTHQGLSSPVTK | |
| | SFNRGEC | |

[0388] Thus, in certain embodiments, an antibody, or antigen-binding fragment thereof, specifically binds to human FAP and optionally human B7H3 at the same or substantially the same paratope, and comprises a heavy chain and a corresponding light chain selected from Table A2. For example, in some embodiments, the heavy chain is at least 80, 85, 90, 95, 97, 98, 99, or 100% identical to a sequence selected from Table A2, including wherein the heavy chain has about 1, 2, 3, 4, 5, or 6 alterations in the framework regions. In some embodiments, the light chain is at least 80, 85, 90, 95, 97, 98, 99, or 100% identical to a sequence selected from Table A2, including wherein the light chain has 1, 2, 3, 4, 5, or 6 alterations in the framework regions.

[0389] In some embodiments, the heavy chain and light chain sequences of an antibody or antigen-binding fragment are as follows:

[0390] the heavy chain comprises a sequence at least 80, 85, 90, 95, 97, 98, 99, or 100% identical to SEQ ID NO: 751, 753, 755, 757, 759, 761, 763, 765, 767, 769, 771, 773, 775, 777, 779, 781, 783, 785, 787, 789, 791, 793, 795, 797, 799, 801, 803, 805, 807, 809, 811, 813, 815, 817, 819, 821, 823, 825, 827, 829, 831, 833, 835, 837, 839, 841, 843, 845, 847, 849, 851, 853, 855, 857, 859, 861, 863, 865, 867, 869, 871, 873, 875, 877, 879, 881, 883, 885, 887, 889, 891, 893, 895, 897, 899, 901, 903, 905, 907, 909, 911, 913, 915, 917, 919, 921, 923, 925, 927, 929, 931, 933, 935, 937, 939, 941, 943, 945, 947, 949, 951, 953, 955, 957, 959, 961, 963, 965, 967, 969, 971, 973, 975, 977, 979, 981, 983, 985, 987, 989, 991, 993, 995, 997, 999, 1001, 1003, or 1005;

[0391] and the light chain respectively comprises a sequence at least 80, 85, 90, 95, 97, 98, 99, or 100% identical to SEQ ID NO: 752, 754, 756, 758, 760, 762, 764, 766, 768, 770, 772, 774, 776, 778, 780, 782, 784, 786, 788, 790, 792, 794, 796, 798, 800, 802, 804, 806, 808, 810, 812, 814, 816, 818, 820, 822, 824, 826, 828, 830, 832, 834, 836, 838, 840, 842, 844, 846, 848, 850, 852, 854, 856, 858, 860, 862, 864, 866, 868, 870, 872, 874, 876, 878, 880, 882, 884, 886, 888, 890, 892, 894, 896, 898, 900, 902, 904, 906, 908, 910, 912, 914, 916, 918, 920, 922, 924, 926, 928, 930, 932, 934, 936, 938, 940, 942, 944, 946, 948, 950, 952, 954, 956, 958, 960, 962, 964, 966, 968, 970, 972, 974, 976, 978, 980, 982, 984, 986, 988, 990, 992, 994, 996, 998, 1000, 1002, 1004, or 1006.

[0392] Also included are variants thereof, for example, variants having 1, 2, 3, 4, 5, or 6 alterations in one or more framework regions. Exemplary “alterations” include amino acid substitutions, additions, and deletions.

[0393] In certain embodiments, variant antibodies or antigen-binding fragments, or V_{H}, V_{L}, or CDR regions thereof, specifically bind to FAP and/or B7H3 at least about 50%, at least about 70%, and in certain embodiments, at least about 90% as well as an antibody sequence specifically set forth herein. In further embodiments, such variant antibodies or antigen-binding fragments, or V_{H}, V_{L}, or CDR regions thereof, bind to FAP and/or B7H3 with greater affinity than the antibodies described herein, for example, that bind quantitatively at least about 105%, 106%, 107%, 108%, 109%, or 110% as well as an antibody sequence specifically set forth herein.

[0394] Determination of the three-dimensional structures of representative polypeptides (e.g., variant antibody or an antigen-binding fragment thereof) may be made through routine methodologies such that substitution, addition, deletion or insertion of one or more amino acids with selected natural or non-natural amino acids can be virtually modeled for purposes of determining whether a so derived structural variant retains the space-filling properties of presently disclosed species. See, for instance, Donate et al., 1994 Prot. Sci. 3:2378; Bradley et al., Science 309: 1868-1871 (2005); Schueler-Furman et al., Science 310:638 (2005); Dietz et al., Proc. Nat. Acad. Sci. USA 103:1244 (2006); Dodson et al., Nature 450:176 (2007); Qian et al., Nature 450:259 (2007); Raman et al. Science 327:1014-1018 (2010). Some additional non-limiting examples of computer algorithms that may be used for these and related embodiments, such as for rational design of antibodies, and antigen-binding domains thereof, as provided herein, include VMD which is a molecular visualization program for displaying, animating, and analyzing large biomolecular systems using 3-D graphics and built-in scripting (see the website for the Theoretical and Computational Biophysics Group, University of Illinois at Urbana-Champagne, at ks.uiuc.edu/Research/vmd/. Many other computer programs are known in the art and available to the skilled person and which allow for determining atomic dimensions from space-filling models (van der Waals radii) of energy-minimized conformations; GRID, which seeks to determine regions of high affinity for different chemical groups, thereby enhancing binding, Monte Carlo searches, which calculate mathematical alignment, and CHARMM (Brooks et al. (1983) J. Comput. Chem. 4:187-217) and AMBER (Weiner et al (1981) J. Comput. Chem. 106: 765), which assess force field calculations, and analysis (see also, Eisenfield et al. (1991) Am. J. Physiol. 261:C376-386; Lybrand (1991) J. Pharm. Belg. 46:49-54; Froimowitz (1990) Biotechniques 8:640-644; Burbam et al. (1990) Proteins 7:99-111; Pedersen (1985) Environ. Health Perspect. 61:185-190; and Kini et al. (1991) J. Biomol. Struct. Dyn. 9:475-488). A variety of appropriate computational computer programs are also commercially available, such as from Schrödinger (Munich, Germany).

[0395] In some embodiments, as noted above, an antibody, or an antigen-binding fragment thereof, specifically binds to human FAP, for example, cell surface-expressed human FAP. Fibroblast activation protein-α, also known as prolyl endopeptidase FAP, is a 170 kDa type II transmembrane glycoprotein. It contains a short cytoplasmic N terminal part (6 amino acids), a transmembrane region (amino acids 7-25), and an extracellular region with an alpha/beta-hydrolase domain and an eight-bladed beta-propeller domain. FAP expression under physiological conditions is very low in the majority of adult tissues. However, FAP expression is high in reactive stromal fibroblasts of epithelial cancers, granulation tissue of healing wounds, and malignant cells of bone and soft tissue sarcomas. FAP is also involved in the control of fibroblast growth or epithelial-mesenchymal interactions during development, tissue repair, and epithelial carcinogenesis. FAP expression is seen on activated stromal fibroblasts of more than 90% of all human carcinomas, and stromal fibroblasts play an important role in the development, growth and metastasis of carcinomas.

[0396] In particular embodiments, the FAP is human FAP, or a peptide epitope thereof. Exemplary human FAP sequences are provided in Table T1 below.

TABLE T1
Exemplary Human FAP Sequences

| Domain and | | SEQ ID |
|---|---|---|
| Residues | Sequence | NO: |
| Full-Length | MKTWVKIVFGVATSAVLALLVMCIVLRPSRVHNSEENTMRALTLKDILN | 1007 |
| | GTFSYKTFFPNWISGQEYLHQSADNNIVLYNIETGQSYTILSNRTMKSV | |
| | NASNYGLSPDRQFVYLESDYSKLWRYSYTATYYIYDLSNGEFVRGNELP | |
| | RPIQYLCWSPVGSKLAYVYQNNIYLKQRPGDPPFQITFNGRENKIFNGI | |
| | PDWVYEEEMLATKYALWWSPNGKFLAYAEFNDTDIPVIAYSYYGDEQYP | |
| | RTINIPYPKAGAKNPVVRIFIIDTTYPAYVGPQEVPVPAMIASSDYYFS | |
| | WLTWVTDERVCLQWLKRVQNVSVLSICDFREDWQTWDCPKTQEHIEESR | |
| | TGWAGGFFVSTPVFSYDAISYYKIFSDKDGYKHIHYIKDTVENAIQITS | |
| | GKWEAINIFRVTQDSLFYSSNEFEEYPGRRNIYRISIGSYPPSKKCVTC | |
| | HLRKERCQYYTASFSDYAKYYALVCYGPGIPISTLHDGRTDQEIKILEE | |
| | NKELENALKNIQLPKEEIKKLEVDEITLWYKMILPPQFDRSKKYPLLIQ | |
| | VYGGPCSQSVRSVFAVNWISYLASKEGMVIALVDGRGTAFQGDKLLYAV | |
| | YRKLGVYEVEDQITAVRKFIEMGFIDEKRIAIWGWSYGGYVSSLALASG | |
| | TGLFKCGIAVAPVSSWEYYASVYTERFMGLPTKDDNLEHYKNSTVMARA | |
| | EYFRNVDYLLIHGTADDNVHFQNSAQIAKALVNAQVDFQAMWYSDQNHG | |
| | LSGLSTNHLYTHMTHFLKQCFSLSD | |
| Extracellular | LRPSRVHNSEENTMRALTLKDILNGTFSYKTFFPNWISGQEYLHQSADN | 1008 |
| region | NIVLYNIETGQSYTILSNRTMKSVNASNYGLSPDRQFVYLESDYSKLWR | |
| | YSYTATYYIYDLSNGEFVRGNELPRPIQYLCWSPVGSKLAYVYQNNIYL | |
| | KQRPGDPPFQITFNGRENKIFNGIPDWVYEEEMLATKYALWWSPNGKFL | |
| | AYAEFNDTDIPVIAYSYYGDEQYPRTINIPYPKAGAKNPVVRIFIIDTT | |
| | YPAYVGPQEVPVPAMIASSDYYFSWLTWVTDERVCLQWLKRVQNVSVLS | |
| | ICDFREDWQTWDCPKTQEHIEESRTGWAGGFFVSTPVFSYDAISYYKIF | |
| | SDKDGYKHIHYIKDTVENAIQITSGKWEAINIFRVTQDSLFYSSNEFEE | |
| | YPGRRNIYRISIGSYPPSKKCVTCHLRKERCQYYTASFSDYAKYYALVC | |
| | YGPGIPISTLHDGRTDQEIKILEENKELENALKNIQLPKEEIKKLEVDE | |
| | ITLWYKMILPPQFDRSKKYPLLIQVYGGPCSQSVRSVFAVNWISYLASK | |
| | EGMVIALVDGRGTAFQGDKLLYAVYRKLGVYEVEDQITAVRKFIEMGFI | |
| | DEKRIAIWGWSYGGYVSSLALASGTGLFKCGIAVAPVSSWEYYASVYTE | |
| | RFMGLPTKDDNLEHYKNSTVMARAEYFRNVDYLLIHGTADDNVHFQNSA | |
| | QIAKALVNAQVDFQAMWYSDQNHGLSGLSTNHLYTHMTHFLKQCFSLSD | |

[0397] In certain embodiments, an antibody, or an antigen-binding fragment thereof, specifically binds to a human FAP from Table T1, for example, an extracellular region of human FAP. In specific embodiments, an antibody, or antigen-binding fragment thereof, binds to human FAP with a K_{D} of about 0.4 or 0.5 nM (400 or 500 pM) or lower.

[0398] In certain embodiments, an antibody, or antigen-binding fragment thereof, specifically binds to human FAP with a binding affinity of about 10 pM to about 500 pM or to about 1 nM, or about, at least about, or no more than about 10, 20, 30, 40, 50, 60, 70, 80, 90, 100, 110, 120, 130, 140, 150, 160, 170, 180, 190, 200, 300, 400, 500, 600, 700, 800, 900 pM, or 1 nM, or optionally with an affinity that ranges from about 10 pM to about 500 pM, about 10 pM to about 400 pM, about 10 pM to about 300 pM, about 10 pM to about 200 pM, about 10 pM to about 100 pM, about 10 pM to about 50 pM, or about 20 pM to about 500 pM, about 20 pM to about 400 pM, about 20 pM to about 300 pM, about 20 pM to about 200 pM, about 20 pM to about 100 pM, about 20 pM to about 50 pM, or about 30 pM to about 500 pM, about 30 pM to about 400 pM, about 30 pM to about 300 pM, about 30 pM to about 200 pM, about 30 pM to about 100 pM, about 30 pM to about 50 pM, or about 20 pM to about 200 pM, about 30 pM to about 300 pM, about 40 pM to about 400 pM, about 50 pM to about 500 pM, about 60 pM to about 600 pM, about 70 pM to about 700 pM, about 80 pM to about 800 pM, about 90 pM to about 900 pM, or about 100 pM to about 1 nM.

[0399] In some embodiments, as noted above, an antibody, or an antigen-binding fragment thereof, has dual binding specificity, and specifically binds to human FAP and B7H3 at the same or substantially the same paratope. CD276 (B7H3) is an immune checkpoint molecule that participates in the regulation of T-cell-mediated immune responses, and is expressed on some solid tumours. It plays a protective role in tumor cells, for example, by inhibiting natural-killer mediated cell lysis and potentially other anti-tumor immune responses.

[0400] In particular embodiments, the B7H3 is human B7H3, or a peptide epitope thereof. Exemplary human B7H3 sequences are provided in Table T2 below.

TABLE T2
Exemplary Human B7H3 Sequences

| Domain and | | SEQ ID |
|---|---|---|
| Residues | Sequence | NO: |
| Full-Length | MLRRRGSPGMGVHVGAALGALWFCLTGALEVQVPEDPVVALVGTDATLC | 1009 |
| | CSFSPEPGFSLAQLNLIWQLTDTKQLVHSFAEGQDQGSAYANRTALFPD | |
| | LLAQGNASLRLQRVRVADEGSFTCFVSIRDFGSAAVSLQVAAPYSKPSM | |
| | TLEPNKDLRPGDTVTITCSSYQGYPEAEVFWQDGQGVPLTGNVTTSQMA | |
| | NEQGLFDVHSILRVVLGANGTYSCLVRNPVLQQDAHSSVTITPQRSPTG | |
| | AVEVQVPEDPVVALVGTDATLRCSFSPEPGFSLAQLNLIWQLTDTKQLV | |
| | HSFTEGRDQGSAYANRTALFPDLLAQGNASLRLQRVRVADEGSFTCFVS | |
| | IRDFGSAAVSLQVAAPYSKPSMTLEPNKDLRPGDTVTITCSSYRGYPEA | |
| | EVFWQDGQGVPLTGNVTTSQMANEQGLFDVHSVLRVVLGANGTYSCLVR | |
| | NPVLQQDAHGSVTITGQPMTFPPEALWVTVGLSVCLIALLVALAFVCWR | |
| | KIKQSCEEENAGAEDQDGEGEGSKTALQPLKHSDSKEDDGQEIA | |
| Ig-like V- | LEVQVPEDPVVALVGTDATLCCSFSPEPGFSLAQLNLIWQLTDTKQLVH | 1010 |
| type 1 | SFAEGQDQGSAYANRTALFPDLLAQGNASLRLQRVRVADEGSFTCFVSI | |
| | RDFGSAAVSLQVA | |
| Ig-like C2- | PSMTLEPNKDLRPGDTVTITCSSYQGYPEAEVFWQDGQGVPLTGNVTTS | 1011 |
| type 1 | QMANEQGLFDVHSILRVVLGANGTYSCLVRNPVLQQDAHSSVTIT | |
| Ig-like V- | PTGAVEVQVPEDPVVALVGTDATLRCSFSPEPGFSLAQLNLIWQLTDTK | 1012 |
| type 2 | QLVHSFTEGRDQGSAYANRTALFPDLLAQGNASLRLQRVRVADEGSFTC | |
| | FVSIRDFGSAAVSLQVA | |
| Ig-like C2- | PSMTLEPNKDLRPGDTVTITCSSYRGYPEAEVFWQDGQGVPLTGNVTTS | 1013 |
| type 2 | QMANEQGLFDVHSVLRVVLGANGTYSCLVRNPVLQQDAHGSVTIT | |

[0401] In certain embodiments, an antibody, or an antigen-binding fragment thereof, specifically binds to a human B7H3 protein, for example, selected from Table T2, including a domain of human B7H3 selected from one or more of the Ig-like V-type 1 domain, Ig-like C2-type 1 domain, Ig-like V-type 2 domain, and an Ig-like C2-type 2 domain. In specific embodiments, an antibody, or antigen-binding fragment thereof, binds to human BH73 with a K_{D} of about 0.4 or 0.5 nM (400 or 500 pM) or lower.

[0402] In certain embodiments, an antibody, or antigen-binding fragment thereof, specifically binds to human B7H3 with a binding affinity of about 10 pM to about 500 pM or to about 1 nM, or about, at least about, or no more than about 10, 20, 30, 40, 50, 60, 70, 80, 90, 100, 110, 120, 130, 140, 150, 160, 170, 180, 190, 200, 300, 400, 500, 600, 700, 800, 900 pM, or 1 nM, or optionally with an affinity that ranges from about 10 pM to about 500 pM, about 10 pM to about 400 pM, about 10 pM to about 300 pM, about 10 pM to about 200 pM, about 10 pM to about 100 pM, about 10 pM to about 50 pM, or about 20 pM to about 500 pM, about 20 pM to about 400 pM, about 20 pM to about 300 pM, about 20 pM to about 200 pM, about 20 pM to about 100 pM, about 20 pM to about 50 pM, or about 30 pM to about 500 pM, about 30 pM to about 400 pM, about 30 pM to about 300 pM, about 30 pM to about 200 pM, about 30 pM to about 100 pM, about 30 pM to about 50 pM, or about 20 pM to about 200 pM, about 30 pM to about 300 pM, about 40 pM to about 400 pM, about 50 pM to about 500 pM, about 60 pM to about 600 pM, about 70 pM to about 700 pM, about 80 pM to about 800 pM, about 90 pM to about 900 pM, or about 100 pM to about 1 nM.

[0403] In some embodiments, an antibody, or antigen-binding fragment thereof, has a binding affinity (Kd or EC₅₀) for each of (i) human FAP and (ii) human B7H3, wherein the affinity for (i) and (ii) is about, within about, or less than about 1.5, 2, 3, 4, 5, 6, 7, 8, 9, 10, 15, 20, 25, 30, 40, or 50-fold relative to each other, or within the range of about 20 pM to about 200 pM, about 30 pM to about 300 pM, about 40 pM to about 400 pM, about 50 pM to about 500 pM, about 60 pM to about 600 pM, about 70 pM to about 700 pM, about 80 pM to about 800 pM, about 90 pM to about 900 pM, about 100 pM to about 1 nM.

[0404] Merely for illustrative purposes, the binding interactions between an antibody, or antigen-binding fragment thereof, and FAP and/or B7H3 can be detected and quantified using a variety of routine methods, including biacore assays (for example, with appropriately tagged soluble reagents, bound to a sensor chip), FACS analyses with cells expressing FAP and/or B7H3 on the cell surface (either native, or recombinant), immunoassays, fluorescence staining assays, ELISA assays, and microcalorimetry approaches such as ITC (Isothermal Titration calorimetry).

[0405] Certain embodiments include bispecific multispecific antibodies, or antigen-binding fragments thereof. For example, some bispecific or multispecific antibodies, or antibody-binding fragments thereof, comprise a first Fab region that specifically binds to human FAP and human B7H3 at the same or substantially the same epitope, as described herein, and a second Fab region that specifically binds to an additional antigen, for example, a cell surface antigen/receptor expressed on an immune cell or cancer cell. Examples of such additional antigens include CD3, human Her2/neu, Her1/EGF receptor (EGFR), EGFR1, EGFR2, EGFR3, Her3, A33 antigen, B7H3, B7H4, CD3, CD4, CD5, CD8, CD16, CD19, CD20, CD30, CD22, CD23 (IgE Receptor), B-cell maturation antigen (BCMA), Trop-2, Claudin 6, claudin 16, MAGE-3, C242 antigen, 5T4, IL-6, IL-13, PD-1, CTLA-4, PD-L1, TIGIT, TIM-3, LAG-3, 4-1BB, vascular endothelial growth factor VEGF (e.g., VEGF-A) VEGFR-1, VEGFR-2, CD27, CD28, CD33, CD37, CD40, CD44, CD51, CD52, CD56, CD74, CD80, CD86, CD137, CD152, CD200, CD221, CCR4, HLA-DR, CTLA-4, NPC-1C, Siglec15, MIC-A, NKG2A, NKG2D, Nkp30, NKp46, tenascin, vimentin, insulin-like growth factor 1 receptor (IGF-1R), alpha-fetoprotein, insulin-like growth factor 1 (IGF-1), carbonic anhydrase 9 (CA-IX), carcinoembryonic antigen (CEA), guanylyl cyclase C, NY-ESO-1, p53, survivin, integrin αvβ3, integrin α5β1, folate receptor 1, transmembrane glycoprotein NMB, fibroblast activation protein alpha (FAP), glycoprotein 75, TAG-72, MUC1, MUC16 (or CA-125), phosphatidylserine, prostate-specific membrane antigen (PSMA), NR-LU-13 antigen, SLAM family member 7 (SLAMF7), EGP40 pancarcinoma antigen, B-cell activating factor (BAFF), platelet-derived growth factor receptor, glycoprotein EpCAM (17-1A), Programmed Death-1, protein disulfide isomerase (PDI), Phosphatase of Regenerating Liver 3 (PRL-3), prostatic acid phosphatase, Lewis-Y antigen, GD2 (a disialoganglioside expressed on tumors of neuroectodermal origin), glypican-3 (GPC3), and mesothelin.

[0406] In some embodiments, an antibody, or antigen-binding fragment thereof, comprises an Fc region, for example, an Fc region selected from an IgA Fc region (including subclasses IgA1 and IgA2), an IgD Fc region, an IgE Fc region, an IgG Fc region (including subclasses IgG1, IgG2, IgG3, and IgG4), and an IgM Fc region. In some instances, the Fc region is a human Fc region. In some embodiments, an Fc region has high effector function in humans, for example, an IgG1 Fc region or an IgG3 Fc region. In some embodiments, an Fc region has low effector function in humans, for example, an IgG2 Fc region or an IgG4 Fc region.

[0407] The Fc region of an antibody interacts with a number of Fc receptors and ligands, imparting an array of important functional capabilities referred to as effector functions. For IgG, the Fc region comprises Ig domains CH2 and CH3 and the N-terminal hinge leading into CH2. One family of Fc receptors for the IgG class are the Fc gamma receptors (FcγRs). These receptors mediate communication between antibodies and the cellular arm of the immune system (Raghavan et al., 1996, Annu Rev Cell Dev Biol 12:181-220; Ravetch et al., 2001, Annu Rev Immunol 19:275-290). In humans this protein family includes FcγRI (CD64), including isoforms FcγRIa, FcγRIb, and FcγRIc; FcγRII (CD32), including isoforms FcγRIIa (including allotypes H131 and R131), FcγRIIb (including FcγRIIb-1 and FcγRIIb-2), and FcγRIIc; and FcγRIII (CD16), including isoforms FcγRIIIa (including allotypes V158 and F158) and FcγRIIIb (including allotypes FcγRIIIb-NA1 and FcγRIIIb-NA2) (Jefferis et al., 2002, Immunol Lett 82:57-65). These receptors typically have an extracellular domain that mediates binding to Fc, a membrane spanning region, and an intracellular domain that may mediate some signaling event within the cell. These receptors are expressed in a variety of immune cells including monocytes, macrophages, neutrophils, dendritic cells, eosinophils, mast cells, platelets, B cells, large granular lymphocytes, Langerhans' cells, natural killer (NK) cells, and T cells. Formation of the Fc/FcγR complex recruits these effector cells to sites of bound antigen, typically resulting in signaling events within the cells and important subsequent immune responses such as release of inflammation mediators, B cell activation, endocytosis, phagocytosis, and cytotoxic attack.

[0408] The ability to mediate cytotoxic and phagocytic effector functions is a potential mechanism by which antibodies destroy targeted cells. The cell-mediated reaction wherein nonspecific cytotoxic cells that express FcγRs recognize bound antibody on a target cell and subsequently cause lysis of the target cell is referred to as antibody dependent cell-mediated cytotoxicity (ADCC) (Raghavan et al., 1996, Annu Rev Cell Dev Biol 12:181-220; Ghetie et al., 2000, Annu Rev Immunol 18:739-766; Ravetch et al., 2001, Annu Rev Immunol 19:275-290). The cell-mediated reaction wherein nonspecific cytotoxic cells that express FcγRs recognize bound antibody on a target cell and subsequently cause phagocytosis of the target cell is referred to as antibody dependent cell-mediated phagocytosis (ADCP). All FcγRs bind the same region on Fc, at the N-terminal end of the Cg2 (CH2) domain and the preceding hinge. This interaction is well characterized structurally (Sondermann et al., 2001, J Mol Biol 309:737-749), and several structures of the human Fc bound to the extracellular domain of human FcγRIIIb have been solved (pdb accession code 1E4K) (Sondermann et al., 2000, Nature 406:267-273.) (pdb accession codes lIIS and lIIX) (Radaev et al., 2001, J Biol Chem 276:16469-16477.)

[0409] The Fc region is also involved in activation of the complement cascade. In the classical complement pathway, C1 binds with its C1q subunits to Fc fragments of IgG or IgM, which has formed a complex with antigen(s). In certain embodiments, modifications to the Fc region comprise modifications that alter (either enhance or decrease) the ability of an antibody, or antigen-binding fragment thereof, as described herein to activate the complement system (see e.g., U.S. Pat. No. 7,740,847). To assess complement activation, a complement-dependent cytotoxicity (CDC) assay may be performed (See, e.g., Gazzano-Santoro et al., J. Immunol. Methods, 202:163 (1996)).

[0410] In some embodiments, an antibody, or antigen-binding fragment thereof, comprises a modified Fc region, including Fc regions having altered properties or biological activities relative to wild-type Fc region(s). In particular embodiments, a modified Fc region has at least one altered effector function and/or pharmacokinetic (PK) characteristic relative to a wild-type Fc region. Thus in certain embodiments, an antibody, or antigen-binding fragment thereof, has a modified Fc region with altered functional properties, such as reduced or enhanced CDC, ADCC, or ADCP activity, reduced or enhanced binding affinity for a specific FcγR, or increased serum half-life.

[0411] Examples of modified Fc regions include those having mutated sequences, for instance, by substitution, insertion, deletion, or truncation of one or more amino acids relative to a wild-type sequence, hybrid Fc polypeptides composed of domains from different immunoglobulin classes/subclasses, Fc polypeptides having altered glycosylation/sialylation patterns, and Fc polypeptides that are modified or derivatized, for example, by biotinylation (see, e.g., US Application No. 2010/0209424), phosphorylation, sulfation, etc., or any combination of the foregoing. Such modifications can be employed to alter (e.g., increase, decrease) the binding properties of the Fc region to one or more particular FcRs (e.g., FcγRI, FcγRIIa, FcγRIIb, FcγRIIc, FcγRIIIa, FcγRIIIb, FcRn), its pharmacokinetic properties (e.g., stability or half-life, bioavailability, tissue distribution, volume of distribution, concentration, elimination rate constant, elimination rate, area under the curve (AUC), clearance, Cmax, tmax, Cmin, fluctuation), its immunogenicity, its complement fixation or activation, and/or the CDC/ADCC/ADCP-related activities of the Fc region, among other properties described herein, relative to a corresponding wild-type Fc sequence of an antibody or antigen-binding fragment thereof. Included are modified Fc regions of human and/or mouse origin.

[0412] Certain embodiments include antibodies, or antigen-binding fragments thereof, which comprise hybrid Fc regions, for example, Fc regions that comprise a combination of Fc domains (e.g., hinge, CH2, CH3, CH4) from immunoglobulins of different species (e.g., human, mouse), different Ig classes, and/or different Ig subclasses. General examples include hybrid Fc regions that comprise, consist of, or consist essentially of the following combination of CH2/CH3 domains: IgA1/IgA1, IgA1/IgA2, IgA1/IgD, IgA1/IgE, IgA1/IgG1, IgA1/IgG2, IgA1/IgG3, IgA1/IgG4, IgA1/IgM, IgA2/IgA1, IgA2/IgA2, IgA2/IgD, IgA2/IgE, IgA2/IgG1, IgA2/IgG2, IgA2/IgG3, IgA2/IgG4, IgA2/IgM, IgD/IgA1, IgD/IgA2, IgD/IgD, IgD/IgE, IgD/IgG1, IgD/IgG2, IgD/IgG3, IgD/IgG4, IgD/IgM, IgE/IgA1, IgE/IgA2, IgE/IgD, IgE/IgE, IgE/IgG1, IgE/IgG2, IgE/IgG3, IgE/IgG4, IgE/IgM, IgG1/IgA1, IgG1/IgA2, IgG1/IgD, IgG1/IgE, IgG1/IgG1, IgG1/IgG2, IgG1/IgG3, IgG1/IgG4, IgG1/IgM, IgG2/IgA1, IgG2/IgA2, IgG2/IgD, IgG2/IgE, IgG2/IgG1, IgG2/IgG2, IgG2/IgG3, IgG2/IgG4, IgG2/IgM, IgG3/IgA1, IgG3/IgA2, IgG3/IgD, IgG3/IgE, IgG3/IgG1, IgG3/IgG2, IgG3/IgG3, IgG3/IgG4, IgG3/IgM, IgG4/IgA1, IgG4/IgA2, IgG4/IgD, IgG4/IgE, IgG4/IgG1, IgG4/IgG2, IgG4/IgG3, IgG4/IgG4, IgG4/IgM, IgM/IgA1, IgM/IgA2, IgM/IgD, IgM/IgE, IgM/IgG1, IgM/IgG2, IgM/IgG3, IgM/IgG4, IgM/IgM (or fragments or variants thereof), and optionally include a hinge from one or more of IgA1, IgA2, IgD, IgG1, IgG2, IgG3, or IgG4, and/or a CH4 domain from IgE and/or IgM. In specific embodiments, the hinge, CH2, CH3, and CH4 domains are from human Ig.

[0413] Additional examples include hybrid Fc regions that comprise, consist of, or consist essentially of the following combination of CH2/CH4 domains: IgA1/IgE, IgA2/IgE, IgD/IgE, IgE/IgE, IgG1/IgE, IgG2/IgE, IgG3/IgE, IgG4/IgE, IgM/IgE, IgA1/IgM, IgA2/IgM, IgD/IgM, IgE/IgM, IgG1/IgM, IgG2/IgM, IgG3/IgM, IgG4/IgM, IgM/IgM (or fragments or variants thereof), and optionally include a hinge from one or more of IgA1, IgA2, IgD, IgG1, IgG2, IgG3, IgG4, and/or a CH3 domain from one or more of IgA1, IgA2, IgD, IgE, IgG1, IgG2, IgG3, IgG4, or IgM. In specific embodiments, the hinge, CH2, CH3, and CH4 domains are from human Ig.

[0414] Certain examples include hybrid Fc regions that comprise, consist of, or consist essentially of the following combination of CH3/CH4 domains: IgA1/IgE, IgA2/IgE, IgD/IgE, IgE/IgE, IgG1/IgE, IgG2/IgE, IgG3/IgE, IgG4/IgE, IgM/IgE, IgA1/IgM, IgA2/IgM, IgD/IgM, IgE/IgM, IgG1/IgM, IgG2/IgM, IgG3/IgM, IgG4/IgM, IgM/IgM (or fragments or variants thereof), and optionally include a hinge from one or more of IgA1, IgA2, IgD, IgG1, IgG2, IgG3, IgG4, and/or a CH2 domain from one or more of IgA1, IgA2, IgD, IgE, IgG1, IgG2, IgG3, IgG4, or IgM. In specific embodiments, the hinge, CH2, CH3, and CH4 domains are from human Ig.

[0415] Particular examples include hybrid Fc regions that comprise, consist of, or consist essentially of the following combination of hinge/CH2 domains: IgA1/IgA1, IgA1/IgA2, IgA1/IgD, IgA1/IgE, IgA1/IgG1, IgA1/IgG2, IgA1/IgG3, IgA1/IgG4, IgA1/IgM, IgA2/IgA1, IgA2/IgA2, IgA2/IgD, IgA2/IgE, IgA2/IgG1, IgA2/IgG2, IgA2/IgG3, IgA2/IgG4, IgA2/IgM, IgD/IgA1, IgD/IgA2, IgD/IgD, IgD/IgE, IgD/IgG1, IgD/IgG2, IgD/IgG3, IgD/IgG4, IgD/IgM, IgG1/IgA1, IgG1/IgA2, IgG1/IgD, IgG1/IgE, IgG1/IgG1, IgG1/IgG2, IgG1/IgG3, IgG1/IgG4, IgG1/IgM, IgG2/IgA1, IgG2/IgA2, IgG2/IgD, IgG2/IgE, IgG2/IgG1, IgG2/IgG2, IgG2/IgG3, IgG2/IgG4, IgG2/IgM, IgG3/IgA1, IgG3/IgA2, IgG3/IgD, IgG3/IgE, IgG3/IgG1, IgG3/IgG2, IgG3/IgG3, IgG3/IgG4, IgG3/IgM, IgG4/IgA1, IgG4/IgA2, IgG4/IgD, IgG4/IgE, IgG4/IgG1, IgG4/IgG2, IgG4/IgG3, IgG4/IgG4, IgG4/IgM (or fragments or variants thereof), and optionally include a CH3 domain from one or more of IgA1, IgA2, IgD, IgE, IgG1, IgG2, IgG3, IgG4, or IgM, and/or a CH4 domain from IgE and/or IgM. In specific embodiments, the hinge, CH2, CH3, and CH4 domains are from human Ig.

[0416] Certain examples include hybrid Fc regions that comprise, consist of, or consist essentially of the following combination of hinge/CH3 domains: IgA1/IgA1, IgA1/IgA2, IgA1/IgD, IgA1/IgE, IgA1/IgG1, IgA1/IgG2, IgA1/IgG3, IgA1/IgG4, IgA1/IgM, IgA2/IgA1, IgA2/IgA2, IgA2/IgD, IgA2/IgE, IgA2/IgG1, IgA2/IgG2, IgA2/IgG3, IgA2/IgG4, IgA2/IgM, IgD/IgA1, IgD/IgA2, IgD/IgD, IgD/IgE, IgD/IgG1, IgD/IgG2, IgD/IgG3, IgD/IgG4, IgD/IgM, IgG1/IgA1, IgG1/IgA2, IgG1/IgD, IgG1/IgE, IgG1/IgG1, IgG1/IgG2, IgG1/IgG3, IgG1/IgG4, IgG1/IgM, IgG2/IgA1, IgG2/IgA2, IgG2/IgD, IgG2/IgE, IgG2/IgG1, IgG2/IgG2, IgG2/IgG3, IgG2/IgG4, IgG2/IgM, IgG3/IgA1, IgG3/IgA2, IgG3/IgD, IgG3/IgE, IgG3/IgG1, IgG3/IgG2, IgG3/IgG3, IgG3/IgG4, IgG3/IgM, IgG4/IgA1, IgG4/IgA2, IgG4/IgD, IgG4/IgE, IgG4/IgG1, IgG4/IgG2, IgG4/IgG3, IgG4/IgG4, IgG4/IgM (or fragments or variants thereof), and optionally include a CH2 domain from one or more of IgA1, IgA2, IgD, IgE, IgG1, IgG2, IgG3, IgG4, or IgM, and/or a CH4 domain from IgE and/or IgM. In specific embodiments, the hinge, CH2, CH3, and CH4 domains are from human Ig.

[0417] Some examples include hybrid Fc regions that comprise, consist of, or consist essentially of the following combination of hinge/CH4 domains: IgA1/IgE, IgA1/IgM, IgA2/IgE, IgA2/IgM, IgD/IgE, IgD/IgM, IgG1/IgE, IgG1/IgM, IgG2/IgE, IgG2/IgM, IgG3/IgE, IgG3/IgM, IgG4/IgE, IgG4/IgM (or fragments or variants thereof), and optionally include a CH2 domain from one or more of IgA1, IgA2, IgD, IgE, IgG1, IgG2, IgG3, IgG4, or IgM, and/or a CH3 domain from one or more of IgA1, IgA2, IgD, IgE, IgG1, IgG2, IgG3, IgG4, or IgM.

[0418] Specific examples of hybrid Fc regions can be found, for example, in WO 2008/147143, which are derived from combinations of IgG subclasses or combinations of human IgD and IgG.

[0419] Also included are antibodies, or antigen-binding fragments thereof, which have derivatized or otherwise modified Fc regions. In certain aspects, the Fc region may be modified by phosphorylation, sulfation, acrylation, glycosylation, methylation, farnesylation, acetylation, amidation, and the like, for instance, relative to a wild-type or naturally-occurring Fc region. In certain embodiments, the Fc region may comprise wild-type or native glycosylation patterns, or alternatively, it may comprise increased glycosylation relative to a native form, decreased glycosylation relative to a native form, or it may be entirely deglycosylated. As one example of a modified Fc glycoform, decreased glycosylation of an Fc region reduces binding to the C1q region of the first complement component C1, a decrease in ADCC-related activity, and/or a decrease in CDC-related activity. Certain embodiments thus employ a deglycosylated or aglycosylated Fc region. See, e.g., WO 2005/047337 for the production of exemplary aglycosylated Fc regions. Another example of an Fc region glycoform can be generated by substituting the Q295 position with a cysteine residue (see, e.g., U.S. Application No. 2010/0080794), according to the Kabat et al. numbering system. Certain embodiments may include Fc regions where about 80-100% of the glycoprotein in Fc region comprises a mature core carbohydrate structure that lacks fructose (see, e.g., U.S. Application No. 2010/0255013). Some embodiments may include Fc regions that are optimized by substitution or deletion to reduce the level of fucosylation, for instance, to increase affinity for FcγRI, FcγRIa, or FcγRIIIa, and/or to improve phagocytosis by FcγRIIa-expressing cells (see U.S. Application Nos. 2010/0249382 and 2007/0148170).

[0420] As another example of a modified Fc glycoform, an Fc region of an antibody or antigen-binding fragment thereof may comprise oligomannose-type N-glycans, and optionally have one or more of the following: increased ADCC effector activity, increased binding affinity for FcγRIIIA (and certain other FcRs), and/or similar or lower binding affinity for mannose receptor, relative to a corresponding Fc region that contains complex-type N-glycans (see, e.g., U.S. Application No. 2007/0092521 and U.S. Pat. No. 7,700,321). As another example, enhanced affinity of Fc regions for FcγRs has been achieved using engineered glycoforms generated by expression of antibodies in engineered or variant cell lines (see, e.g., Umana et al., Nat Biotechnol. 17:176-180, 1999; Davies et al., Biotechnol Bioeng. 74:288-294, 2001; Shields et al., J Biol Chem. 277:26733-26740, 2002; Shinkawa et al., 2003, J Biol Chem. 278:3466-3473, 2003; and U.S. Application No. 2007/0111281). Certain Fc region glycoforms comprise an increased proportion of N-glycoside bond type complex sugar chains, which do not have the 1-position of fucose bound to the 6-position of N-acetylglucosamine at the reducing end of the sugar chain (see, e.g., U.S. Application No. 2010/0092997). Particular embodiments may include IgG Fc region that is glycosylated with at least one galactose moiety connected to a respective terminal sialic acid moiety by an α-2,6 linkage, optionally where the Fc region has a higher anti-inflammatory activity relative to a corresponding, wild-type Fc region (see U.S. Application No. 2008/0206246). Certain of these and related altered glycosylation approaches have generated substantial enhancements of the capacity of Fc regions to selectively bind FcRs such as FcγRIII, to mediate ADCC, and to alter other properties of Fc regions, as described herein.

[0421] Certain modified Fc regions of an antibody or antigen-binding fragment thereof may have altered binding to one or more FcRs, and/or corresponding changes to effector function, relative to a corresponding, wild-type Fc sequence (e.g., same species, same Ig class, same Ig subclass). For instance, such Fc regions may have increased binding to one or more of Fcγ receptors, Fcα receptors, Fcε receptors, and/or the neonatal Fc receptor, relative to a corresponding, wild-type Fc sequence. In other embodiments, variant, fragment, hybrid, or modified Fc regions may have decreased binding to one or more of Fcγ receptors, Fcα receptors, Fcε receptors, and/or the neonatal Fc receptor, relative to a corresponding, wild-type Fc sequence. Specific FcRs are described elsewhere herein.

[0422] In some embodiments, an antibody comprises an Fc domain, comprising one or more mutations to increase binding to one or more of Fcγ receptors, Fcα receptors, Fcε receptors, and/or the neonatal Fc receptor, relative to a corresponding, wild-type Fc sequence. In some embodiments, an antibody comprises an Fc domain, comprising one or more mutations to decrease binding to one or more of Fcγ receptors, Fcα receptors, Fcε receptors, and/or the neonatal Fc receptor, relative to a corresponding, wild-type Fc sequence.

[0423] Specific examples of Fc variants having altered (e.g., increased, decreased) effector function/FcR binding can be found, for example, in U.S. Pat. Nos. 5,624,821 and 7,425,619; U.S. Application Nos. 2009/0017023, 2009/0010921, and 2010/0203046; and WO 2000/42072 and WO 2004/016750. Certain examples include human Fc regions having a one or more substitutions at position 298, 333, and/or 334, for example, S298A, E333A, and/or K334A (based on the numbering of the EU index of Kabat et al.), which have been shown to increase binding to the activating receptor FcγRIIIa and reduce binding to the inhibitory receptor FcγRIIb. These mutations can be combined to obtain double and triple mutation variants that have further improvements in binding to FcRs. Certain embodiments include a S298A/E333A/K334A triple mutant, which has increased binding to FcγRIIIa, decreased binding to FcγRIIb, and increased ADCC (see, e.g., Shields et al., J Biol Chem. 276:6591-6604, 2001; and Presta et al., Biochem Soc Trans. 30:487-490, 2002). See also engineered Fc glycoforms that have increased binding to FcRs, as disclosed in Umana et al., supra; and U.S. Pat. No. 7,662,925. Some embodiments include Fc regions that comprise one or more substitutions selected from 434S, 252Y/428L, 252Y/434S, and 428L/434S (see U.S. Application Nos. 2009/0163699 and 20060173170), based on the EU index of Kabat et al.

[0424] As noted above, certain modified Fc regions may have altered effector functions, relative to a corresponding, wild-type Fc sequence. For example, such Fc regions may have increased complement fixation or activation, increased Clq binding affinity, increased CDC-related activity, increased ADCC-related activity, and/or increased ADCP-related activity, relative to a corresponding, wild-type Fc sequence. In some embodiments, such Fc regions may have decreased complement fixation or activation, decreased Clq binding affinity, decreased CDC-related activity, decreased ADCC-related activity, and/or decreased ADCP-related activity, relative to a corresponding, wild-type Fc sequence. As merely one illustrative example, an Fc region may comprise a deletion or substitution in a complement-binding site, such as a Clq-binding site, and/or a deletion or substitution in an ADCC site. Examples of such deletions/substitutions are described, for example, in U.S. Pat. No. 7,030,226. Many Fc effector functions, such as ADCC, can be assayed according to routine techniques in the art. (see, e.g., Zuckerman et al., CRC Crit Rev Microbiol. 7:1-26, 1978). Useful effector cells for such assays includes, but are not limited to, natural killer (NK) cells, macrophages, and other peripheral blood mononuclear cells (PBMC). Alternatively, or additionally, certain Fc effector functions may be assessed in vivo, for example, by employing an animal model described in Clynes et al. PNAS. 95:652-656, 1998.

[0425] Certain modified Fc regions have altered stability or half-life relative to a corresponding, wild-type Fc sequence. In certain embodiments, such Fc regions may have increased half-life relative to a corresponding, wild-type Fc sequence. In some embodiments, modified Fc regions have decreased half-life relative to a corresponding, wild-type Fc sequence. Half-life can be measured in vitro (e.g., under physiological conditions) or in vivo, according to routine techniques in the art, such as radiolabeling, ELISA, or other methods. In vivo measurements of stability or half-life can be measured in one or more bodily fluids, including blood, serum, plasma, urine, or cerebrospinal fluid, or a given tissue, such as the liver, kidneys, muscle, central nervous system tissues, bone, etc. As one example, modifications to an Fc region that alter its ability to bind the FcRn can alter its half-life in vivo. Assays for measuring the in vivo pharmacokinetic properties (e.g., in vivo mean elimination half-life) and non-limiting examples of Fc modifications that alter its binding to the FcRn are described, for example, in U.S. Pat. Nos. 7,217,797 and 7,732,570; and U.S. Application Nos. US 2010/0143254 and 2010/0143254.

[0426] Additional non-limiting examples of modifications to alter stability or half-life include substitutions/deletions at one or more of amino acid residues selected from 251-256, 285-290, and 308-314 in the CH2 domain, and 385-389 and 428-436 in the CH3 domain, according to the numbering system of Kabat et al. See U.S. Application No. 2003/0190311. Specific examples include substitution with leucine at position 251, substitution with tyrosine, tryptophan or phenylalanine at position 252, substitution with threonine or serine at position 254, substitution with arginine at position 255, substitution with glutamine, arginine, serine, threonine, or glutamate at position 256, substitution with threonine at position 308, substitution with proline at position 309, substitution with serine at position 311, substitution with aspartate at position 312, substitution with leucine at position 314, substitution with arginine, aspartate or serine at position 385, substitution with threonine or proline at position 386, substitution with arginine or proline at position 387, substitution with proline, asparagine or serine at position 389, substitution with methionine or threonine at position 428, substitution with tyrosine or phenylalanine at position 434, substitution with histidine, arginine, lysine or serine at position 433, and/or substitution with histidine, tyrosine, arginine or threonine at position 436, including any combination thereof. Such modifications optionally increase affinity of the Fc region for the FcRn and thereby increase half-life, relative to a corresponding, wild-type Fc region.

[0427] Certain modified Fc regions have altered solubility relative to a corresponding, wild-type Fc sequence. In certain embodiments, such Fc regions have increased solubility relative to a corresponding, wild-type Fc sequence. In some embodiments, modified Fc regions have decreased solubility relative to a corresponding, wild-type Fc sequence. Solubility can be measured, for example, in vitro (e.g., under physiological conditions) according to routine techniques in the art. Exemplary solubility measurements are described elsewhere herein.

[0428] Additional examples of variants include IgG Fc regions having conservative or non-conservative substitutions (as described elsewhere herein) at one or more of positions 250, 314, or 428 of the heavy chain, or in any combination thereof, such as at positions 250 and 428, or at positions 250 and 314, or at positions 314 and 428, or at positions 250, 314, and 428 (see, e.g., U.S. Application No. 2011/0183412). In specific embodiments, the residue at position 250 is substituted with glutamic acid or glutamine, and/or the residue at position 428 is substituted with leucine or phenylalanine. As another illustrative example of an IgG Fc variant, any one or more of the amino acid residues at positions 214 to 238, 297 to 299, 318 to 322, and/or 327 to 331 may be used as a suitable target for modification (e.g., conservative or non-conservative substitution, deletion). In particular embodiments, the IgG Fc variant CH2 domain contains amino acid substitutions at positions 228, 234, 235, and/or 331 (e.g., human IgG4 with Ser228Pro and Leu235Ala mutations) to attenuate the effector functions of the Fc region (see U.S. Pat. No. 7,030,226). Here, the numbering of the residues in the heavy chain is that of the EU index (see Kabat et al., “Sequences of Proteins of Immunological Interest,” 5th Ed., National Institutes of Health, Bethesda, Md. (1991)). Certain of these and related embodiments have altered (e.g., increased, decreased) FcRn binding and/or serum half-life, optionally without reduced effector functions such as ADCC or CDC-related activities.

[0429] Additional examples include variant Fc regions that comprise one or more amino acid substitutions at positions 279, 341, 343 or 373 of a wild-type Fc region, or any combination thereof (see, e.g., U.S. Application No. 2007/0224188). The wild-type amino acid residues at these positions for human IgG are valine (279), glycine (341), proline (343) and tyrosine (373). The substation(s) can be conservative or non-conservative, or can include non-naturally occurring amino acids or mimetics, as described herein. Alone or in combination with these substitutions, certain embodiments may also employ a variant Fc region that comprises at least 1, 2, 3, 4, 5, 6, 7, 8, 9, 10 or more amino acid substitutions selected from the following: 235G, 235R, 236F, 236R, 236Y, 237K, 237N, 237R, 238E, 238G, 238H, 238I, 238L, 238V, 238W, 238Y, 244L, 245R, 247A, 247D, 247E, 247F, 247M, 247N, 247Q, 247R, 247S, 247T, 247W, 247Y, 248F, 248P, 248Q, 248W, 249L, 249M, 249N, 249P, 249Y, 251H, 251I, 251W, 254D, 254E, 254F, 254G, 254H, 254I, 254K, 254L, 254M, 254N, 254P, 254Q, 254R, 254V, 254W, 254Y, 255K, 255N, 256H, 256I, 256K, 256L, 256V, 256W, 256Y, 257A, 257I, 257M, 257N, 257S, 258D, 260S, 262L, 264S, 265K, 265S, 267H, 267I, 267K, 268K, 269N, 269Q, 271T, 272H, 272K, 272L, 272R, 279A, 279D, 279F, 279G, 279H, 279I, 279K, 279L, 279M, 279N, 279Q, 279R, 279S, 279T, 279W, 279Y, 280T, 283F, 283G, 283H, 283I, 283K, 283L, 283M, 283P, 283R, 283T, 283W, 283Y, 285N, 286F, 288N, 288P, 292E, 292F, 292G, 292I, 292L, 293S, 293V, 301W, 304E, 307E, 307M, 312P, 315F, 315K, 315L, 315P, 315R, 316F, 316K, 317P, 317T, 318N, 318P, 318T, 332F, 332G, 332L, 332M, 332S, 332V, 332W, 339D, 339E, 339F, 339G, 339H, 339I, 339K, 339L, 339M, 339N, 339Q, 339R, 339S, 339W, 339Y, 341D, 341E, 341F, 341H, 341I, 341K, 341L, 341M, 341N, 341P, 341Q, 341R, 341S, 341T, 341V, 341W, 341Y, 343A, 343D, 343E, 343F, 343G, 343H, 343I, 343K, 343L, 343M, 343N, 343Q, 343R, 343S, 343T, 343V, 343W, 343Y, 373D, 373E, 373F, 373G, 373H, 373I, 373K, 373L, 373M, 373N, 373Q, 373R, 373S, 373T, 373V, 373W, 375R, 376E, 376F, 376G, 376H, 376I, 376L, 376M, 376N, 376P, 376Q, 376R, 376S, 376T, 376V, 376W, 376Y, 377G, 377K, 377P, 378N, 379N, 379Q, 379S, 379T, 380D, 380N, 380S, 380T, 382D, 382F, 382H, 382I, 382K, 382L, 382M, 382N, 382P, 382Q, 382R, 382S, 382T, 382V, 382W, 382Y, 385E, 385P, 386K, 423N, 424H, 424M, 424V, 426D, 426L, 427N, 429A, 429F, 429M, 430A, 430D, 430F, 430G, 430H, 430I, 430K, 430L, 430M, 430N, 430P, 430Q, 430R, 430S, 430T, 430V, 430W, 430Y, 431H, 431K, 431P, 432R, 432S, 438G, 438K, 438L, 438T, 438W, 439E, 439H, 439Q, 440D, 440E, 440F, 440G, 440H, 440I, 440K, 440L, 440M, 440Q, 440T, 440V or 442K. As above, the numbering of the residues in the heavy chain is that of the EU index (see Kabat et al., supra). Such variant Fc regions typically confer an altered effector function or altered serum half-life upon the antibody to which the variant Fc region is operably attached. Preferably the altered effector function is an increase in ADCC, a decrease in ADCC, an increase in CDC, a decrease in CDC, an increase in Clq binding affinity, a decrease in Clq binding affinity, an increase in FcR (preferably FcRn) binding affinity or a decrease in FcR (preferably FcRn) binding affinity as compared to a corresponding Fc region that lacks such amino acid substitution(s).

[0430] Additional examples include variant Fc regions that comprise an amino acid substitution at one or more of position(s) 221, 222, 224, 227, 228, 230, 231, 223, 233, 234, 235, 236, 237, 238, 239, 240, 241, 243, 244, 245, 246, 247, 249, 250, 258, 262, 263, 264, 265, 266, 267, 268, 269, 270, 271, 272, 273, 274, 275, 276, 278, 280, 281, 283, 285, 286, 288, 290, 291, 293, 294, 295, 296, 297, 298, 299, 300, 302, 313, 317, 318, 320, 322, 323, 324, 325, 326, 327, 328, 329, 330, 331, 332, 333, 334, 335 336 and/or 428 (see, e.g., U.S. Pat. No. 7,662,925). In specific embodiments, the variant Fc region comprises at least one amino acid substitution selected from the group consisting of: P230A, E233D, L234E, L234Y, L234I, L235D, L235S, L235Y, L235I, S239D, S239E, S239N, S239Q, S239T, V240I, V240M, F243L, V264I, V264T, V264Y, V266I, E272Y, K274T, K274E, K274R, K274L, K274Y, F275W, N276L, Y278T, V302I, E318R, S324D, S324I, S324V, N325T, K326I, K326T, L328M, L328I, L328Q, L328D, L328V, L328T, A330Y, A330L, A330I, I332D, I332E, I332N, I332Q, T335D, T335R, and T335Y. In other specific embodiments, the variant Fc region comprises at least one amino acid substitution selected from the group consisting of: V264I, F243L/V264I, L328M, I332E, L328M/I332E, V264I/I332E, S298A/I332E, S239E/I332E, S239Q/I332E, S239E, A330Y, I332D, L328I/I332E, L328Q/I332E, V264T, V240I, V266I, S239D, S239D/I332D, S239D/I332E, S239D/I332N, S239D/I332Q, S239E/I332D, S239E/I332N, S239E/I332Q, S239N/I332D, S239N/I332E, S239Q/I332D, A330Y/I332E, V264I/A330Y/I332E, A330L/I332E, V264I/A330L/I332E, L234E, L234Y, L234I, L235D, L235S, L235Y, L235I, S239T, V240M, V264Y, A330I, N325T, L328D/I332E, L328V/I332E, L328T/I332E, L328I/I332E, S239E/V264I/I332E, S239Q/V264I/I332E, S239E/V264I/A330Y/I332E, S239D/A330Y/I332E, S239N/A330Y/I332E, S239D/A330L/I332E, S239N/A330L/I332E, V264I/S298A/I332E, S239D/S298A/I332E, S239N/S298A/I332E, S239D/V264I/I332E, S239D/V264I/S298A/I332E, S239D/N264I/A330L/I332E, S239D/I332E/A330I, P230A, P230A/E233D/I332E, E272Y, K274T, K274E, K274R, K274L, K274Y, F275W, N276L, Y278T, V302I, E318R, S324D, S324I, S324V, K326I, K326T, T335D, T335R, T335Y, V240I/V266I, S239D/A330Y/I332E/L234I, S239D/A330Y/I332E/L235D, S239D/A330Y/I332E/V240I, S239D/A330Y/I332E/V264T, S239D/A330Y/I332E/K326E, and S239D/A330Y/I332E/K326T, In more specific embodiments, the variant Fc region comprises a series of substitutions selected from the group consisting of: N297D/I332E, F241Y/F243Y/V262T/V264T/N297D/I332E, S239D/N297D/I332E, S239E/N297D/I332E, S239D/D265Y/N297D/I332E, S239D/D265H/N297D/I332E, V264E/N297D/I332E, Y296N/N297D/I332E, N297D/A330Y/I332E, S239D/D265V/N297D/I332E, S239D/D265I/N297D/I332E, and N297D/S298A/A330Y/I332E. In specific embodiments, the variant Fc region comprises an amino acid substitution at position 332 (using the numbering of the EU index, Kabat et al., supra). Examples of substitutions include 332A, 332D, 332E, 332F, 332G, 332H, 332K, 332L, 332M, 332N, 332P, 332Q, 332R, 332S, 332T, 332V, 332W and 332Y. The numbering of the residues in the Fc region is that of the EU index of Kabat et al. Among other properties described herein, such variant Fc regions may have increased affinity for an FcγR, increased stability, and/or increased solubility, relative to a corresponding, wild-type Fc region.

[0431] Further examples include variant Fc regions that comprise one or more of the following amino acid substitutions: 224N/Y, 225A, 228L, 230S, 239P, 240A, 241L, 243S/L/G/H/I, 244L, 246E, 247L/A, 252T, 254T/P, 258K, 261Y, 265V, 266A, 267G/N, 268N, 269K/G, 273A, 276D, 278H, 279M, 280N, 283G, 285R, 288R, 289A, 290E, 291L, 292Q, 297D, 299A, 300H, 301C, 304G, 305A, 306I/F, 311R, 312N, 315D/K/S, 320R, 322E, 323A, 324T, 325S, 326E/R, 332T, 333D/G, 335I, 338R, 339T, 340Q, 341E, 342R, 344Q, 347R, 351S, 352A, 354A, 355W, 356G, 358T, 361D/Y, 362L, 364C, 365Q/P, 370R, 372L, 377V, 378T, 383N, 389S, 390D, 391C, 393A, 394A, 399G, 404S, 408G, 409R, 411I, 412A, 414M, 421S, 422I, 426F/P, 428T, 430K, 431S, 432P, 433P, 438L, 439E/R, 440G, 441F, 442T, 445R, 446A, 447E, optionally where the variant has altered recognition of an Fc ligand and/or altered effector function compared with a parent Fc polypeptide, and wherein the numbering of the residues is that of the EU index as in Kabat et al. Specific examples of these and related embodiments include variant Fc regions that comprise or consist of the following sets of substitutions: (1) N276D, R292Q, V305A, I377V, T394A, V412A and K439E; (2) P244L, K246E, D399G and K409R; (3) S304G, K320R, S324T, K326E and M358T; (4) F243S, P247L, D265V, V266A, S383N and T411I; (5) H224N, F243L, T393A and H433P; (6) V240A, S267G, G341E and E356G; (7) M252T, P291L, P352A, R355W, N390D, S408G, S426F and A431S; (8) P228L, T289A, L365Q, N389S and S440G; (9) F241L, V273A, K340Q and L441F; (10) F241L, T299A, I332T and M428T; (11) E269K, Y300H, Q342R, V422I and G446A; (12) T225A, R301c, S304G, D312N, N315D, L351S and N421S; (13) S254T, L306I, K326R and Q362L; (14) H224Y, P230S, V323A, E333D, K338R and S364C; (15) T335I, K414M and P445R; (16) T335I and K414M; (17) P247A, E258K, D280N, K288R, N297D, T299A, K322E, Q342R, S354A and L365P; (18) H268N, V279M, A339T, N361D and S426P; (19) C261Y, K290E, L306F, Q311R, E333G and Q438L; (20) E283G, N315K, E333G, R344Q, L365P and S442T; (21) Q347R, N361Y and K439R; (22) S239P, S254P, S267N, H285R, N315S, F372L, A378T, N390D, Y391C, F404S, E430K, L432P and K447E; and (23) E269G, Y278H, N325S and K370R, wherein the numbering of the residues is that of the EU index as in Kabat et al. (see, e.g., U.S. Application No. 2010/0184959).

[0432] Variant Fc regions can also have one or more mutated hinge regions, as described, for example, in U.S. Application No. 2003/0118592. For instance, one or more cysteines in a hinge region can be deleted or substituted with a different amino acid. The mutated hinge region can comprise no cysteine residues, or it can comprise 1, 2, or 3 fewer cysteine residues than a corresponding, wild-type hinge region. In some embodiments, an Fc region having a mutated hinge region of this type exhibits a reduced ability to dimerize, relative to a wild-type Ig hinge region.

[0433] As noted above, antibodies having altered Fc regions typically have altered (e.g., improved, increased, decreased) pharmacokinetic properties relative to corresponding wild-type Fc region. Examples of pharmacokinetic properties include stability or half-life, bioavailability (the fraction of a drug that is absorbed), tissue distribution, volume of distribution (apparent volume in which a drug is distributed immediately after it has been injected intravenously and equilibrated between plasma and the surrounding tissues), concentration (initial or steady-state concentration of drug in plasma), elimination rate constant (rate at which drugs are removed from the body), elimination rate (rate of infusion required to balance elimination), area under the curve (AUC or exposure; integral of the concentration-time curve, after a single dose or in steady state), clearance (volume of plasma cleared of the drug per unit time), Cmax (peak plasma concentration of a drug after oral administration), tmax (time to reach Cmax), Cmin (lowest concentration that a drug reaches before the next dose is administered), and fluctuation (peak trough fluctuation within one dosing interval at steady state).

[0434] In particular embodiments, an antibody or antigen-binding fragment thereof has a biological half life at about pH 7.4, at about a physiological pH, at about 25° C. or room temperature, and/or at about 37° C. or human body temperature (e.g., in vivo, in serum, in a given tissue, in a given species such as rat, mouse, monkey, or human), of about or at least about 30 minutes, about 1 hour, about 2 hour, about 3 hours, about 4 hours, about 5 hours, about 6 hours, about 12 hours, about 18 hours, about 20 hours, about 24 hours, about 30 hours, about 36 hours, about 40 hours, about 48 hours, about 50 hours, about 60 hours, about 70 hours, about 72 hours, about 80 hours, about 84 hours, about 90 hours, about 96 hours, about 120 hours, or about 144 hours or more, or about 1 week, or about 2 weeks, or about 3 weeks, or about 4 weeks, or about 5 weeks, or about 6 weeks or more, or any intervening half-life, including all ranges in between.

[0435] In some embodiments, an antibody, or antigen-binding fragment thereof, has a Tm of about or at least about 60, 62, 64, 66, 68, 70, 72, 74, or 75° C. In some embodiments, an antibody, or antigen-binding fragment, thereof has a Tm of about 60° C. or greater.

[0436] Certain embodiments include fusion proteins and conjugates, comprising an antibody, or antigen-binding fragment thereof, as described herein. For example, certain embodiments relate to an antibody, or an antigen-binding fragment thereof, which is fused via an optional linker to a heterologous effector domain (see, for example, FIGS. 4A-4F). Examples of effector domains include immune cell-stimulatory ligands or domains, immune cell-inhibitory ligands or domains, and cytocidal (e.g., tumor cell cytocidal) ligands or domains. In specific embodiments, the heterologous effector domain is selected from one or more of interleukin-2 (IL-2), interleukin-15 (IL-15), hybrid IL-2/IL-15, interleukin-7 (IL-7), interleukin-10 (IL-10), interleukin-21 (L-12), a TNF superfamily ligand such as TRAIL, 4-1BBL, interleukin-21 (IL-21), an interferon (e.g., IFN-alpha, IFN-beta, IFN-gamma), CD40, GITR-L, OX40L, and CD70.

[0437] Certain fusion proteins include chimeric antigen receptors, or CARs, and cells comprising the same, including immune cells such as T-cells or dendritic cells. Thus, certain embodiments include a single-chain variable fragment (scFv) described herein, which has dual binding specificity for human FAP and B7H3, and which is fused via a spacer (or hinge) region to a transmembrane domain and an intracellular T-cell signaling domain, to form a CAR (see FIG. 5). Certain embodiments include a chimeric antigen receptor (CAR) T cell, comprising the CAR.

[0438] A peptide linker/spacer sequence may also be employed to separate multiple polypeptide components by a distance sufficient to ensure that each polypeptide folds into its secondary and/or tertiary structures, if desired. Such a peptide linker sequence can be incorporated into a fusion polypeptide using standard techniques well known in the art.

[0439] Certain peptide spacer sequences may be chosen, for example, based on: (1) their ability to adopt a flexible extended conformation; (2) their inability to adopt a secondary structure that could interact with functional epitopes on the first and second polypeptides; and/or (3) the lack of hydrophobic or charged residues that might react with the polypeptide functional epitopes.

[0440] In one illustrative embodiment, peptide spacer sequences contain, for example, Gly, Asn, and Ser residues. Other near neutral amino acids, such as Thr and Ala, may also be included in the spacer sequence.

[0441] Other amino acid sequences which may be usefully employed as spacers include those disclosed in Maratea et al., Gene 40:39 46 (1985); Murphy et al., Proc. Natl. Acad. Sci. USA 83:8258 8262 (1986); U.S. Pat. Nos. 4,935,233 and 4,751,180.

[0442] Other illustrative spacers may include, for example, Glu-Gly-Lys-Ser-Ser-Gly-Ser-Gly-Ser-Glu-Ser-Lys-Val-Asp (SEQ ID NO: 1014) (Chaudhary et al., 1990, Proc. Natl. Acad. Sci. U.S.A. 87:1066-1070) and Lys-Glu-Ser-Gly-Ser-Val-Ser-Ser-Glu-Gln-Leu-Ala-Gln-Phe-Arg-Ser-Leu-Asp (SEQ ID NO: 1015) (Bird et al., 1988, Science 242:423-426).

[0443] In some embodiments, spacer sequences are not required when the first and second polypeptides have non-essential N-terminal amino acid regions that can be used to separate the functional domains and prevent steric interference. Two coding sequences can be fused directly without any spacer or by using a flexible polylinker composed, for example, of the pentamer Gly-Gly-Gly-Gly-Ser (SEQ ID NO: 1016) repeated 1 to 3 times. Such a spacer has been used in constructing single chain antibodies (scFv) by being inserted between V_{H} and V_{L} (Bird et al., 1988, Science 242:423-426; Huston et al., 1988, Proc. Natl. Acad. Sci. U.S.A. 85:5979-5883).

[0444] A peptide spacer, in certain embodiments, is designed to enable the correct interaction between two beta-sheets forming the variable region of the single chain antibody.

[0445] In certain illustrative embodiments, a peptide spacer is between 1 to 5 amino acids, between 5 to 10 amino acids, between 5 to 25 amino acids, between 5 to 50 amino acids, between 10 to 25 amino acids, between 10 to 50 amino acids, between 10 to 100 amino acids, or any intervening range of amino acids.

[0446] In other illustrative embodiments, a peptide spacer comprises about 1, 5, 10, 15, 20, 25, 30, 35, 40, 45, 50 or more amino acids in length.

[0447] Certain embodiments include an antibody, or an antigen-binding fragment thereof, which is conjugated or otherwise operably linked to an additional molecule, for example, a small molecule or proteinaceous toxin, a DNA or RNA molecule, a detectable label, a radioisotope, an aptamer, or an epitope tag. There are many linking groups known in the art for making antibody conjugates, including, for example, those disclosed in U.S. Pat. No. 5,208,020 or EP Patent 0 425 235 B1, and Chari et al., Cancer Research 52: 127-131 (1992). The linking groups include disulfide groups, thioether groups, acid labile groups, photolabile groups, peptidase labile groups, and esterase labile groups, among others.

[0448] In some embodiments, an antibody, or antigen-binding fragment thereof, is conjugated or operably linked to a therapeutic compound. For instance, in some embodiments, an antibody, or antigen-binding fragment thereof, is conjugated to one or more cytotoxic or chemotherapeutic agents. General examples of cytotoxic or chemotherapeutic agents include, without limitation, alkylating agents, anti-metabolites, anthracyclines, anti-tumor antibiotics, platinums, type I topoisomerase inhibitors, type II topoisomerase inhibitors, vinca alkaloids, and taxanes.

[0449] In some embodiments, an antibody, or antigen-binding fragment thereof, is conjugated or operably linked to a radioisotope to form a radioconjugate. A variety of radioactive isotopes are available for the production of radioconjugate antibodies. Examples include, but are not limited to ⁹⁰Y, ¹²³I, ¹²⁵I, ¹³¹I, ¹⁸⁶Re, ¹⁸⁸Re, ²¹¹At, and ²¹²Bi. In some embodiments, an antibody, or antigen-binding fragment thereof, is conjugated or operably linked to a macrocyclic chelator useful for conjugating to radiometal ions. In certain embodiments, the macrocyclic chelator is 1,4,7,10-tetraazacyclododecane-N,N′,N″,N′″-tetraacetic acid (DOTA) which can be attached to the antibody via a linker molecule. Such linker molecules are commonly known in the art and described in Denardo et al., 1998, Clin Cancer Res. 4:2483-90; Peterson et al., 1999, Bioconjug. Chem. 10:553; and Zimmerman et al., 1999, Nucl. Med. Biol. 26:943-50.

[0450] In various embodiments, the antibodies described herein are conjugated to a detectable label that may be detected directly or indirectly. In “direct detection”, only one detectable antibody is used, i.e., a primary detectable antibody. Thus, direct detection means that the antibody that is conjugated to a detectable label may be detected, per se, without the need for the addition of a second antibody (secondary antibody).

[0451] A “detectable label” is a molecule or material that can produce a detectable (such as visually, electronically or otherwise) signal that indicates the presence and/or concentration of the label in a sample. When conjugated to an antibody, the detectable label can be used to locate and/or quantify the target to which the specific antibody is directed. Thereby, the presence and/or concentration of the target in a sample can be detected by detecting the signal produced by the detectable label. A detectable label can be detected directly or indirectly, and several different detectable labels conjugated to different specific-antibodies can be used in combination to detect one or more targets.

[0452] Examples of detectable labels, which may be detected directly, include fluorescent dyes and radioactive substances and metal particles. In contrast, indirect detection requires the application of one or more additional antibodies, i.e., secondary antibodies, after application of the primary antibody. Thus, the detection is performed by the detection of the binding of the secondary antibody or binding agent to the primary detectable antibody. Examples of primary detectable binding agents or antibodies requiring addition of a secondary binding agent or antibody include enzymatic detectable binding agents and hapten detectable binding agents or antibodies.

[0453] In some embodiments, the detectable label is conjugated to a nucleic acid polymer which comprises the first binding agent (e.g., in an ISH, WISH, or FISH process). In other embodiments, the detectable label is conjugated to an antibody which comprises the first binding agent (e.g., in an IHC process).

[0454] Examples of detectable labels include fluorescent labels, enzyme labels, radioisotopes, chemiluminescent labels, electrochemiluminescent labels, bioluminescent labels, polymers, polymer particles, metal particles, haptens, and dyes.

[0455] Examples of fluorescent labels include 5-(and 6)-carboxyfluorescein, 5- or 6-carboxyfluorescein, 6-(fluorescein)-5-(and 6)-carboxamido hexanoic acid, fluorescein isothiocyanate, rhodamine, tetramethylrhodamine, and dyes such as Cy2, Cy3, and Cy5, optionally substituted coumarin including AMCA, PerCP, phycobiliproteins including R-phycoerythrin (RPE) and allophycoerythrin (APC), Texas Red, Princeton Red, green fluorescent protein (GFP) and analogues thereof, and conjugates of R-phycoerythrin or allophycoerythrin, inorganic fluorescent labels such as particles based on semiconductor material like coated CdSe nanocrystallites.

[0456] Examples of polymer particle labels include micro particles or latex particles of polystyrene, PMMA or silica, which can be embedded with fluorescent dyes, or polymer micelles or capsules which contain dyes, enzymes or substrates.

[0457] Examples of metal particle labels include gold particles and coated gold particles, which can be converted by silver stains. Examples of haptens include DNP, fluorescein isothiocyanate (FITC), biotin, and digoxigenin. Examples of enzymatic labels include horseradish peroxidase (HRP), alkaline phosphatase (ALP or AP), β-galactosidase (GAL), glucose-6-phosphate dehydrogenase, β-N-acetylglucosamimidase,β-glucuronidase, invertase, Xanthine Oxidase, firefly luciferase and glucose oxidase (GO). Examples of commonly used substrates for horseradishperoxidase include 3,3′-diaminobenzidine (DAB), diaminobenzidine with nickel enhancement, 3-amino-9-ethylcarbazole (AEC), Benzidine dihydrochloride (BDHC), Hanker-Yates reagent (HYR), Indophane blue (IB), tetramethylbenzidine (TMB), 4-chloro-1-naphtol (CN), alpha-naphtol pyronin (.alpha.-NP), o-dianisidine (OD), 5-bromo-4-chloro-3-indolylphosp-hate (BCIP), Nitro blue tetrazolium (NBT), 2-(p-iodophenyl)-3-p-nitropheny-1-5-phenyl tetrazolium chloride (INT), tetranitro blue tetrazolium (TNBT), 5-bromo-4-chloro-3-indoxyl-beta-D-galactoside/ferro-ferricyanide (BCIG/FF).

[0458] Examples of commonly used substrates for Alkaline Phosphatase include Naphthol-AS-B 1-phosphate/fast red TR (NABP/FR), Naphthol-AS-MX-phosphate/fast red TR (NAMP/FR), Naphthol-AS-B1-phosphate/-fast red TR (NABP/FR), Naphthol-AS-MX-phosphate/fast red TR (NAMP/FR), Naphthol-AS-B1-phosphate/new fuschin (NABP/NF), bromochloroindolyl phosphate/nitroblue tetrazolium (BCIP/NBT), 5-Bromo-4-chloro-3-indolyl-b--d-galactopyranoside (BCIG).

[0459] Examples of luminescent labels include luminol, isoluminol, acridinium esters, 1,2-dioxetanes and pyridopyridazines. Examples of electrochemiluminescent labels include ruthenium derivatives. Examples of radioactive labels include radioactive isotopes of iodide, cobalt, selenium, tritium, carbon, sulfur and phosphorous.

[0460] The detectable labels or markers may be detected visually using, e.g., light microscopy, fluorescent microscopy, electron microscopy where the detectable substance is for example a dye, a colloidal gold particle, a luminescent reagent. Visually detectable substances bound to a biological marker may also be detected using a spectrophotometer. Where the detectable substance is a radioactive isotope detection can be visually by autoradiography, or non-visually using a scintillation counter. See, e.g., Larsson, 1988, Immunocytochemistry: Theory and Practice, (CRC Press, Boca Raton, Fla.); Methods in Molecular Biology, vol. 80 1998, John D. Pound (ed.) (Humana Press, Totowa, N.J.).

[0461] The desired functional properties of an antibody, or antigen-binding fragment thereof, may be assessed using a variety of methods known to the skilled person affinity/binding assays (for example, surface plasmon resonance, competitive inhibition assays); cytotoxicity assays, cell viability assays, cell proliferation or differentiation assays, cancer cell and/or tumor growth inhibition using in vitro or in vivo models. The antibodies described herein may also be tested for in vitro and in vivo efficacy. Such assays may be performed using well-established protocols known to the skilled person (see e.g., Current Protocols in Molecular Biology (Greene Publ. Assoc. Inc. & John Wiley & Sons, Inc., NY, NY); Current Protocols in Immunology (Edited by: John E. Coligan, Ada M. Kruisbeek, David H. Margulies, Ethan M. Shevach, Warren Strober 2001 John Wiley & Sons, NY, NY); or commercially available kits.

[0462] Methods of Use and Pharmaceutical Compositions

[0463] Certain embodiments include methods of treating, ameliorating the symptoms of, and/or reducing the progression of, a disease or condition in a subject in need thereof, comprising administering to the subject an antibody, or antigen-binding fragment thereof, as described herein

[0464] In some embodiments, the disease is a cancer, that is, the subject in need thereof has or is suspected of having a cancer. Certain embodiments thus include methods of treating, ameliorating the symptoms of, or inhibiting the progression of, a cancer in a subject in need thereof, comprising administering to the subject an antibody, or antigen-binding fragment thereof, as described herein, or a pharmaceutical or therapeutic composition comprising the same. Also included are methods of administering a fusion protein, or a bispecific or multispecific antibody, as described herein.

[0465] In some embodiments, the cancer associated with increased or aberrant expression of one or more proteins. For example, in some embodiments, the cancer is associated with increased or aberrant FAP expression, including wherein the subject has, or is selected for treatment based on having, the cancer associated with increased or aberrant FAP expression. In certain embodiments, the cancer is associated with increased or aberrant B7H3 expression, including wherein the subject has, or is selected for treatment based on having, a cancer associated with increased or aberrant B87H3 expression.

[0466] Certain embodiments include cell therapies that employ an antibody, or antigen-binding fragment thereof, as described herein. For example, certain embodiments include chimeric antigen receptor (CAR) T-cell therapies, which utilize T cells that have been genetically engineered to produce an artificial T cell receptor for use in immunotherapy. Certain embodiments thus include methods of administering a CART cell to a subject in need thereof, as described herein. In particular embodiments, a CAR T cell comprises a single-chain variable fragment (scFv), which specifically binds to FAP and optionally B7H3 at the same or substantially the same epitope, as described herein, and which is fused via a spacer (hinge) region to a transmembrane domain and an intracellular T-cell signaling domain, to form a CAR (see FIG. 5). Certain embodiments include the steps of preparing the CAR T cell, for example, by obtaining a T cell from a subject in need thereof, engineering the T cell to comprise and express a polynucleotide that encodes the CAR, and administering the CAR T cell to the subject.

[0467] In some embodiments, administration of an antibody, or antigen-binding fragment thereof, or fusion protein or CAR T cell comprising the same, enhances an immune response to the cancer by about, or at least about, 5, 10, 15, 20, 25, 30, 35, 40, 45, 50, 60, 70, 80, 90, 100, 200, 300, 400, 500, 600, 700, 800, 900, 1000, 2000% or more, relative to a control. In some embodiments, any one or more of the effector domains or bispecific/multispecific Fab regions described herein can be used to further increase an immune response to the cancer.

[0468] In some embodiments, administration of an antibody, or antigen-binding fragment thereof, or fusion protein or CAR T cell comprising the same, increases cancer cell killing in the subject by about or at least about 5, 10, 15, 20, 25, 30, 35, 40, 45, 50, 60, 70, 80, 90, 100, 200, 300, 400, 500, 600, 700, 800, 900, 1000, 2000% or more relative to an untreated control. In some embodiments, any one or more of the effector domains or bispecific/multispecific Fab regions described herein can be used to further increase the cancer cell killing activity.

[0469] In some embodiments, administration of an antibody, or antigen-binding fragment thereof, or fusion protein or CART cell comprising the same, reduces invasiveness of the cancer by about or at least about 5, 10, 15, 20, 25, 30, 35, 40, 45, 50, 60, 70, 80, 90, 100, 200, 300, 400, 500, 600, 700, 800, 900, 1000, 2000% or more relative to an untreated control. In some embodiments, any one or more of the effector domains or bispecific/multispecific Fab regions described herein can be used to further reduce the invasiveness of the cancer.

[0470] In particular embodiments, the cancer is a primary cancer or a metastatic cancer. In specific embodiments, the cancer is selected from one or more of melanoma (optionally metastatic melanoma), kidney cancer (optionally renal cell carcinoma), pancreatic cancer, bone cancer, prostate cancer, small cell lung cancer, non-small cell lung cancer (NSCLC), mesothelioma, leukemia (optionally lymphocytic leukemia, chronic myelogenous leukemia, acute myeloid leukemia, or relapsed acute myeloid leukemia), multiple myeloma, lymphoma, hepatoma (hepatocellular carcinoma), sarcoma, B-cell malignancy, breast cancer, ovarian cancer, colorectal cancer, glioma, glioblastoma multiforme, meningioma, pituitary adenoma, vestibular schwannoma, primary CNS lymphoma, primitive neuroectodermal tumor (medulloblastoma), bladder cancer, uterine cancer, esophageal cancer, brain cancer, head and neck cancers, cervical cancer, testicular cancer, thyroid cancer, and stomach cancer.

[0471] In some embodiments, as noted above, the cancer is a metastatic cancer. Further to the above cancers, exemplary metastatic cancers include, without limitation, bladder cancers which have metastasized to the bone, liver, and/or lungs; breast cancers which have metastasized to the bone, brain, liver, and/or lungs; colorectal cancers which have metastasized to the liver, lungs, and/or peritoneum; kidney cancers which have metastasized to the adrenal glands, bone, brain, liver, and/or lungs; lung cancers which have metastasized to the adrenal glands, bone, brain, liver, and/or other lung sites; melanomas which have metastasized to the bone, brain, liver, lung, and/or skin/muscle; ovarian cancers which have metastasized to the liver, lung, and/or peritoneum; pancreatic cancers which have metastasized to the liver, lung, and/or peritoneum; prostate cancers which have metastasized to the adrenal glands, bone, liver, and/or lungs; stomach cancers which have metastasized to the liver, lung, and/or peritoneum; thyroid cancers which have metastasized to the bone, liver, and/or lungs; and uterine cancers which have metastasized to the bone, liver, lung, peritoneum, and/or vagina; among others.

[0472] In some embodiments, the antibodies, or antigen-binding fragments thereof, disclosed herein are used as part of adoptive immunotherapies, for example, autologous immunotherapies. Certain embodiments thus include methods of treating a cancer in a patient in need thereof, comprising:

[0473] (a) incubating ex vivo-derived immune cells an antibody, or antigen-binding fragment thereof, described herein; and

[0474] (b) administering the autologous immune cells to the patient.

[0475] In some instances, the ex vivo-derived immune cells are autologous cells, which are obtained from the patient to be treated. In some embodiments, the autologous immune cells comprise lymphocytes, natural killer (NK) cells, macrophages, and/or dendritic cells (DCs). In some embodiments, the lymphocytes comprise T-cells, optionally cytotoxic T-lymphocytes (CTLs). See, for example, June, J Clin Invest. 117: 1466-1476, 2007; Rosenberg and Restifo, Science. 348:62-68, 2015; Cooley et al., Biol. of Blood and Marrow Transplant. 13:33-42, 2007; and Li and Sun, Chin J Cancer Res. 30:173-196, 2018, for descriptions of adoptive T-cell and NK cell immunotherapies. In certain embodiments, the antibody, or antigen-binding fragment thereof, enhances the efficacy of the adoptively transferred immune cells.

[0476] The methods for treating cancers can be combined with other therapeutic modalities. For example, a combination therapy described herein can be administered to a subject before, during, or after other therapeutic interventions, including symptomatic care, radiotherapy, surgery, transplantation, hormone therapy, photodynamic therapy, antibiotic therapy, or any combination thereof. Symptomatic care includes administration of corticosteroids, to reduce cerebral edema, headaches, cognitive dysfunction, and emesis, and administration of anti-convulsants, to reduce seizures. Radiotherapy includes whole-brain irradiation, fractionated radiotherapy, and radiosurgery, such as stereotactic radiosurgery, which can be further combined with traditional surgery.

[0477] Certain embodiments thus include combination therapies for treating cancers, including methods of treating ameliorating the symptoms of, or inhibiting the progression of, a cancer in a subject in need thereof, comprising administering to the subject at least one antibody, or antigen-binding fragment thereof, described herein in combination with at least one additional agent, for example, a cancer immunotherapy agent, a chemotherapeutic agent, a hormonal therapeutic agent, and/or a kinase inhibitor. In some embodiments, administering the at least one antibody, or antigen-binding fragment thereof, enhances the susceptibility of the cancer to the additional agent by about or at least about 5, 10, 15, 20, 25, 30, 35, 40, 45, 50, 60, 70, 80, 90, 100, 200, 300, 400, 500, 600, 700, 800, 900, 1000, 2000% or more relative to the additional agent alone.

[0478] Certain combination therapies employ one or more cancer immunotherapy agents. In certain instances, an immunotherapy agent modulates the immune response of a subject, for example, to increase or maintain a cancer-related or cancer-specific immune response, and thereby results in increased immune cell inhibition or reduction of cancer cells. Exemplary immunotherapy agents include polypeptides, for example, antibodies and antigen-binding fragments thereof, ligands, and small peptides, and mixtures thereof. Also include as immunotherapy agents are small molecules, cells (e.g., immune cells such as T-cells), various cancer vaccines, gene therapy or other polynucleotide-based agents, including viral agents such as oncolytic viruses, and others known in the art. Thus, in certain embodiments, the cancer immunotherapy agent is selected from one or more of immune checkpoint modulatory agents, cancer vaccines, oncolytic viruses, cytokines, and a cell-based immunotherapies.

[0479] In certain embodiments, the cancer immunotherapy agent is an immune checkpoint modulatory agent. Particular examples include “antagonists” of one or more inhibitory immune checkpoint molecules, and “agonists” of one or more stimulatory immune checkpoint molecules. Generally, immune checkpoint molecules are components of the immune system that either turn up a signal (co-stimulatory molecules) or turn down a signal, the targeting of which has therapeutic potential in cancer because cancer cells can perturb the natural function of immune checkpoint molecules (see, e.g., Sharma and Allison, Science. 348:56-61, 2015; Topalian et al., Cancer Cell. 27:450-461, 2015; Pardoll, Nature Reviews Cancer. 12:252-264, 2012). In some embodiments, the immune checkpoint modulatory agent (e.g., antagonist, agonist) “binds” or “specifically binds” to the one or more immune checkpoint molecules, as described herein.

[0480] In particular embodiments, the immune checkpoint modulatory agent is a polypeptide or peptide. The terms “peptide” and “polypeptide” are used interchangeably herein, however, in certain instances, the term “peptide” can refer to shorter polypeptides, for example, polypeptides that consist of about 2, 3, 4, 5, 6, 7, 8, 9, 10, 11, 12, 13, 14, 15, 16, 17, 18, 19, 20, 25, 30, 35, 40, 45, or 50 amino acids, including all integers and ranges (e.g., 5-10, 8-12, 10-15) in between. Polypeptides and peptides can be composed of naturally-occurring amino acids and/or non-naturally occurring amino acids, as described herein

[0481] Antibodies are also included as polypeptides. Thus, in some embodiments, the immune checkpoint modulatory polypeptide agent is an antibody or “antigen-binding fragment thereof”, as described elsewhere herein.

[0482] In some embodiments, the agent is or comprises a “ligand,” for example, a natural ligand, of the immune checkpoint molecule. A “ligand” refers generally to a substance or molecule that forms a complex with a target molecule (e.g., biomolecule) to serve a biological purpose, and includes a “protein ligand,” which generally produces a signal by binding to a site on a target molecule or target protein. Thus, certain agents are protein ligands that, in nature, bind to an immune checkpoint molecule and produce a signal. Also included are “modified ligands,” for example, protein ligands that are fused to a pharmacokinetic modifier, for example, an Fc region derived from an immunoglobulin.

[0483] The binding properties of polypeptides can be quantified using methods well known in the art (see Davies et al., Annual Rev. Biochem. 59:439-473, 1990). In some embodiments, a polypeptide specifically binds to a target molecule, for example, an immune checkpoint molecule or an epitope thereof, with an equilibrium dissociation constant that is about or ranges from about ≤10-7 to about 10-8 M. In some embodiments, the equilibrium dissociation constant is about or ranges from about ≤10-9 M to about ≤10-10 M. In certain illustrative embodiments, the polypeptide has an affinity (Kd or EC₅₀) for a target described herein (to which it specifically binds) of about, at least about, or less than about, 0.01, 0.05, 0.1, 0.2, 0.3, 0.4, 0.5, 0.6, 0.7, 0.8, 0.9, 1, 2, 3, 4, 5, 6, 7, 8, 9, 10, 11, 12, 13, 14, 15, 16, 17, 18, 19, 20, 21, 22, 23, 24, 25, 26, 27, 28, 29, 30, 40, or 50 nM.

[0484] In some embodiments, the agent is a “small molecule,” which refers to an organic compound that is of synthetic or biological origin (biomolecule), but is typically not a polymer. Organic compounds refer to a large class of chemical compounds whose molecules contain carbon, typically excluding those that contain only carbonates, simple oxides of carbon, or cyanides. A “biomolecule” refers generally to an organic molecule that is produced by a living organism, including large polymeric molecules (biopolymers) such as peptides, polysaccharides, and nucleic acids as well, and small molecules such as primary secondary metabolites, lipids, phospholipids, glycolipids, sterols, glycerolipids, vitamins, and hormones. A “polymer” refers generally to a large molecule or macromolecule composed of repeating structural units, which are typically connected by covalent chemical bond.

[0485] In certain embodiments, a small molecule has a molecular weight of about or less than about 1000-2000 Daltons, typically between about 300 and 700 Daltons, and including about or less than about 50, 100, 150, 200, 250, 300, 350, 400, 450, 500, 550, 500, 650, 600, 750, 700, 850, 800, 950, 1000 or 2000 Daltons.

[0486] Certain small molecules can have the “specific binding” characteristics described for herein polypeptides such as antibodies. For instance, in some embodiments a small molecule specifically binds to a target, for example, an immune checkpoint molecule, with a binding affinity (Kd or EC₅₀) of about, at least about, or less than about, 0.01, 0.05, 0.1, 0.2, 0.3, 0.4, 0.5, 0.6, 0.7, 0.8, 0.9, 1, 2, 3, 4, 5, 6, 7, 8, 9, 10, 11, 12, 13, 14, 15, 16, 17, 18, 19, 20, 21, 22, 23, 24, 25, 26, 27, 28, 29, 30, 40, or 50 nM.

[0487] In some embodiments, the immune checkpoint modulatory agent is an antagonist or inhibitor of one or more inhibitory immune checkpoint molecules. Exemplary inhibitory immune checkpoint molecules include Programmed Death-Ligand 1 (PD-L1), Programmed Death-Ligand 2 (PD-L2), Programmed Death 1 (PD-1), Cytotoxic T-Lymphocyte-Associated protein 4 (CTLA-4), Indoleamine 2,3-dioxygenase (IDO), tryptophan 2,3-dioxygenase (TDO), T-cell Immunoglobulin domain and Mucin domain 3 (TIM-3), Lymphocyte Activation Gene-3 (LAG-3), V-domain Ig suppressor of T cell activation (VISTA), B and T Lymphocyte Attenuator (BTLA), CD160, and T-cell immunoreceptor with Ig and ITIM domains (TIGIT).

[0488] In certain embodiments, the agent is a PD-1 (receptor) antagonist or inhibitor, the targeting of which has been shown to restore immune function in the tumor environment (see, e.g., Phillips et al., Int. Immunol. 27:39-46, 2015). PD-1 is a cell surface receptor that belongs to the immunoglobulin superfamily and is expressed on T cells and pro-B cells. PD-1 interacts with two ligands, PD-L1 and PD-L2. PD-1 functions as an inhibitory immune checkpoint molecule, for example, by reducing or preventing the activation of T-cells, which in turn reduces autoimmunity and promotes self-tolerance. The inhibitory effect of PD-1 is accomplished at least in part through a dual mechanism of promoting apoptosis in antigen specific T-cells in lymph nodes while also reducing apoptosis in regulatory T cells (suppressor T cells). Some examples of PD-1 antagonists or inhibitors include an antibody or antigen-binding fragment or small molecule that specifically binds to PD-1 and reduces one or more of its immune-suppressive activities, for example, its downstream signaling or its interaction with PD-L1. Specific examples of PD-1 antagonists or inhibitors include the antibodies nivolumab, pembrolizumab, PDR001, MK-3475, AMP-224, AMP-514, and pidilizumab, and antigen-binding fragments thereof (see, e.g., U.S. Pat. Nos. 8,008,449; 8,993,731; 9,073,994; 9,084,776; 9,102,727; 9,102,728; 9,181,342; 9,217,034; 9,387,247; 9,492,539; 9,492,540; and U.S. Application Nos. 2012/0039906; 2015/0203579).

[0489] In some embodiments, the agent is a PD-L1 antagonist or inhibitor. As noted above, PD-L1 is one of the natural ligands for the PD-1 receptor. General examples of PD-L1 antagonists or inhibitors include an antibody or antigen-binding fragment or small molecule that specifically binds to PD-L1 and reduces one or more of its immune-suppressive activities, for example, its binding to the PD-1 receptor. Specific examples of PD-L1 antagonists include the antibodies atezolizumab (MPDL3280A), avelumab (MSB0010718C), and durvalumab (MEDI4736), and antigen-binding fragments thereof (see, e.g., U.S. Pat. Nos. 9,102,725; 9,393,301; 9,402,899; 9,439,962).

[0490] In some embodiments, the agent is a PD-L2 antagonist or inhibitor. As noted above, PD-L2 is one of the natural ligands for the PD-1 receptor. General examples of PD-L2 antagonists or inhibitors include an antibody or antigen-binding fragment or small molecule that specifically binds to PD-L2 and reduces one or more of its immune-suppressive activities, for example, its binding to the PD-1 receptor.

[0491] In some embodiments, the agent is a CTLA-4 antagonist or inhibitor. CTLA4 or CTLA-4 (cytotoxic T-lymphocyte-associated protein 4), also known as CD152 (cluster of differentiation 152), is a protein receptor that functions as an inhibitory immune checkpoint molecule, for example, by transmitting inhibitory signals to T-cells when it is bound to CD80 or CD86 on the surface of antigen-presenting cells. General examples CTLA-4 antagonists or inhibitors include an antibody or antigen-binding fragment or small molecule that specifically binds to CTLA-4. Particular examples include the antibodies ipilimumab and tremelimumab, and antigen-binding fragments thereof. At least some of the activity of ipilimumab is believed to be mediated by antibody-dependent cell-mediated cytotoxicity (ADCC) killing of suppressor Tregs that express CTLA-4.

[0492] In some embodiments, the agent is an IDO antagonist or inhibitor, or a TDO antagonist or inhibitor. IDO and TDO are tryptophan catabolic enzymes with immune-inhibitory properties. For example, IDO is known to suppress T-cells and NK cells, generate and activate Tregs and myeloid-derived suppressor cells, and promote tumor angiogenesis. General examples of IDO and TDO antagonists or inhibitors include an antibody or antigen-binding fragment or small molecule that specifically binds to IDO or TDO (see, e.g., Platten et al., Front Immunol. 5: 673, 2014) and reduces or inhibits one or more immune-suppressive activities. Specific examples of IDO antagonists or inhibitors include indoximod (NLG-8189), 1-methyl-tryptophan (1MT), β-Carboline (norharmane; 9H-pyrido[3,4-b]indole), rosmarinic acid, and epacadostat (see, e.g., Sheridan, Nature Biotechnology. 33:321-322, 2015). Specific examples of TDO antagonists or inhibitors include 680C91 and LM10 (see, e.g., Pilotte et al., PNAS USA. 109:2497-2502, 2012).

[0493] In some embodiments, the agent is a TIM-3 antagonist or inhibitor. T-cell Immunoglobulin domain and Mucin domain 3 (TIM-3) is expressed on activated human CD4+ T-cells and regulates Th1 and Th17 cytokines. TIM-3 also acts as a negative regulator of Th1/Tc1 function by triggering cell death upon interaction with its ligand, galectin-9. TIM-3 contributes to the suppressive tumor microenvironment and its overexpression is associated with poor prognosis in a variety of cancers (see, e.g., Li et al., Acta Oncol. 54:1706-13, 2015). General examples of TIM-3 antagonists or inhibitors include an antibody or antigen-binding fragment or small molecule that specifically binds to TIM-3 and reduces or inhibits one or more of its immune-suppressive activities.

[0494] In some embodiments, the agent is a LAG-3 antagonist or inhibitor. Lymphocyte Activation Gene-3 (LAG-3) is expressed on activated T-cells, natural killer cells, B-cells and plasmacytoid dendritic cells. It negatively regulates cellular proliferation, activation, and homeostasis of T-cells, in a similar fashion to CTLA-4 and PD-1 (see, e.g., Workman and Vignali. European Journal of Immun 33: 970-9, 2003; and Workman et al., Journal of Immun 172: 5450-5, 2004), and has been reported to play a role in Treg suppressive function (see, e.g., Huang et al., Immunity. 21: 503-13, 2004). LAG3 also maintains CD8+ T-cells in a tolerogenic state and combines with PD-1 to maintain CD8 T-cell exhaustion. General examples of LAG-3 antagonists or inhibitors include an antibody or antigen-binding fragment or small molecule that specifically binds to LAG-3 and inhibits one or more of its immune-suppressive activities. Specific examples include the antibody BMS-986016, and antigen-binding fragments thereof.

[0495] In some embodiments, the agent is a VISTA antagonist or inhibitor. V-domain Ig suppressor of T cell activation (VISTA) is primarily expressed on hematopoietic cells and is an inhibitory immune checkpoint regulator that suppresses T-cell activation, induces Foxp3 expression, and is highly expressed within the tumor microenvironment where it suppresses anti-tumor T cell responses (see, e.g., Lines et al., Cancer Res. 74:1924-32, 2014). General examples of VISTA antagonists or inhibitors include an antibody or antigen-binding fragment or small molecule that specifically binds to VISTA and reduces one or more of its immune-suppressive activities.

[0496] In some embodiments, the agent is a BTLA antagonist or inhibitor. B- and T-lymphocyte attenuator (BTLA; CD272) expression is induced during activation of T-cells, and it inhibits T-cells via interaction with tumor necrosis family receptors (TNF-R) and B7 family of cell surface receptors. BTLA is a ligand for tumor necrosis factor (receptor) superfamily, member 14 (TNFRSF14), also known as herpes virus entry mediator (HVEM). BTLA-HVEM complexes negatively regulate T-cell immune responses, for example, by inhibiting the function of human CD8+ cancer-specific T-cells (see, e.g., Derré et al., J Clin Invest 120:157-67, 2009). General examples of BTLA antagonists or inhibitors include an antibody or antigen-binding fragment or small molecule that specifically binds to BTLA-4 and reduce one or more of its immune-suppressive activities.

[0497] In some embodiments, the agent is an HVEM antagonist or inhibitor, for example, an antagonist or inhibitor that specifically binds to HVEM and interferes with its interaction with BTLA or CD160. General examples of HVEM antagonists or inhibitors include an antibody or antigen-binding fragment or small molecule that specifically binds to HVEM, optionally reduces the HVEM/BTLA and/or HVEM/CD160 interaction, and thereby reduces one or more of the immune-suppressive activities of HVEM.

[0498] In some embodiments, the agent is a CD160 antagonist or inhibitor, for example, an antagonist or inhibitor that specifically binds to CD160 and interferes with its interaction with HVEM. General examples of CD160 antagonists or inhibitors include an antibody or antigen-binding fragment or small molecule that specifically binds to CD160, optionally reduces the CD160/HVEM interaction, and thereby reduces or inhibits one or more of its immune-suppressive activities.

[0499] In some embodiments, the agent is a TIGIT antagonist or inhibitor. T cell Ig and ITIM domain (TIGIT) is a co-inhibitory receptor that is found on the surface of a variety of lymphoid cells, and suppresses antitumor immunity, for example, via Tregs (Kurtulus et al., J Clin Invest. 125:4053-4062, 2015). General examples of TIGIT antagonists or inhibitors include an antibody or antigen-binding fragment or small molecule that specifically binds to TIGIT and reduce one or more of its immune-suppressive activities (see, e.g., Johnston et al., Cancer Cell. 26:923-37, 2014).

[0500] In certain embodiments, the immune checkpoint modulatory agent is an agonist of one or more stimulatory immune checkpoint molecules. Exemplary stimulatory immune checkpoint molecules include OX40, CD40, Glucocorticoid-Induced TNFR Family Related Gene (GITR), CD137 (4-1BB), CD27, CD28, CD226, and Herpes Virus Entry Mediator (HVEM).

[0501] In some embodiments, the agent is an OX40 agonist. OX40 (CD134) promotes the expansion of effector and memory T cells, and suppresses the differentiation and activity of T-regulatory cells (see, e.g., Croft et al., Immunol Rev. 229:173-91, 2009). Its ligand is OX40L (CD252). Since OX40 signaling influences both T-cell activation and survival, it plays a key role in the initiation of an anti-tumor immune response in the lymph node and in the maintenance of the anti-tumor immune response in the tumor microenvironment. General examples of OX40 agonists include an antibody or antigen-binding fragment or small molecule or ligand that specifically binds to OX40 and increases one or more of its immunostimulatory activities. Specific examples include OX86, OX-40L, Fc-OX40L, GSK3174998, MEDI0562 (a humanized OX40 agonist), MEDI6469 (murine OX4 agonist), and MEDI6383 (an OX40 agonist), and antigen-binding fragments thereof.

[0502] In some embodiments, the agent is a CD40 agonist. CD40 is expressed on antigen-presenting cells (APC) and some malignancies. Its ligand is CD40L (CD154). On APC, ligation results in upregulation of costimulatory molecules, potentially bypassing the need for T-cell assistance in an antitumor immune response. CD40 agonist therapy plays an important role in APC maturation and their migration from the tumor to the lymph nodes, resulting in elevated antigen presentation and T cell activation. Anti-CD40 agonist antibodies produce substantial responses and durable anticancer immunity in animal models, an effect mediated at least in part by cytotoxic T-cells (see, e.g., Johnson et al. Clin Cancer Res. 21: 1321-1328, 2015; and Vonderheide and Glennie, Clin Cancer Res. 19:1035-43, 2013). General examples of CD40 agonists include an antibody or antigen-binding fragment or small molecule or ligand that specifically binds to CD40 and increases one or more of its immunostimulatory activities. Specific examples include CP-870,893, dacetuzumab, Chi Lob 7/4, ADC-1013, CD40L, rhCD40L, and antigen-binding fragments thereof.

[0503] In some embodiments, the agent is a GITR agonist. Glucocorticoid-Induced TNFR family Related gene (GITR) increases T cell expansion, inhibits the suppressive activity of Tregs, and extends the survival of T-effector cells. GITR agonists have been shown to promote an anti-tumor response through loss of Treg lineage stability (see, e.g., Schaer et al., Cancer Immunol Res. 1:320-31, 2013). These diverse mechanisms show that GITR plays an important role in initiating the immune response in the lymph nodes and in maintaining the immune response in the tumor tissue. Its ligand is GITRL. General examples of GITR agonists include an antibody or antigen-binding fragment or small molecule or ligand that specifically binds to GITR and increases one or more of its immunostimulatory activities. Specific examples include GITRL, INCAGN01876, DTA-1, MEDI1873, and antigen-binding fragments thereof.

[0504] In some embodiments, the agent is a CD137 agonist. CD137 (4-1BB) is a member of the tumor necrosis factor (TNF) receptor family, and crosslinking of CD137 enhances T-cell proliferation, IL-2 secretion, survival, and cytolytic activity. CD137-mediated signaling also protects T-cells such as CD8+ T-cells from activation-induced cell death. General examples of CD137 agonists include an antibody or antigen-binding fragment or small molecule or ligand that specifically binds to CD137 and increases one or more of its immunostimulatory activities. Specific examples include the CD137 (or 4-1BB) ligand (see, e.g., Shao and Schwarz, J Leukoc Biol. 89:21-9, 2011) and the antibody utomilumab, including antigen-binding fragments thereof.

[0505] In some embodiments, the agent is a CD27 agonist. Stimulation of CD27 increases antigen-specific expansion of naïve T cells and contributes to T-cell memory and long-term maintenance of T-cell immunity. Its ligand is CD70. The targeting of human CD27 with an agonist antibody stimulates T-cell activation and antitumor immunity (see, e.g., Thomas et al., Oncoimmunology. 2014; 3:e27255. doi:10.4161/onci.27255; and He et al., J Immunol. 191:4174-83, 2013). General examples of CD27 agonists include an antibody or antigen-binding fragment or small molecule or ligand that specifically binds to CD27 and increases one or more of its immunostimulatory activities. Specific examples include CD70 and the antibodies varlilumab and CDX-1127 (1F5), including antigen-binding fragments thereof.

[0506] In some embodiments, the agent is a CD28 agonist. CD28 is constitutively expressed CD4+ T cells some CD8+ T cells. Its ligands include CD80 and CD86, and its stimulation increases T-cell expansion. General examples of CD28 agonists include an antibody or antigen-binding fragment or small molecule or ligand that specifically binds to CD28 and increases one or more of its immunostimulatory activities. Specific examples include CD80, CD86, the antibody TAB08, and antigen-binding fragments thereof.

[0507] In some embodiments, the agent is CD226 agonist. CD226 is a stimulating receptor that shares ligands with TIGIT, and opposite to TIGIT, engagement of CD226 enhances T-cell activation (see, e.g., Kurtulus et al., J Clin Invest. 125:4053-4062, 2015; Bottino et al., J Exp Med. 1984:557-567, 2003; and Tahara-Hanaoka et al., Int Immunol. 16:533-538, 2004). General examples of CD226 agonists include an antibody or antigen-binding fragment or small molecule or ligand (e.g., CD112, CD155) that specifically binds to CD226 and increases one or more of its immunostimulatory activities.

[0508] In some embodiments, the agent is an HVEM agonist. Herpesvirus entry mediator (HVEM), also known as tumor necrosis factor receptor superfamily member 14 (TNFRSF14), is a human cell surface receptor of the TNF-receptor superfamily. HVEM is found on a variety of cells including T-cells, APCs, and other immune cells. Unlike other receptors, HVEM is expressed at high levels on resting T-cells and down-regulated upon activation. It has been shown that HVEM signaling plays a crucial role in the early phases of T-cell activation and during the expansion of tumor-specific lymphocyte populations in the lymph nodes. General examples of HVEM agonists include an antibody or antigen-binding fragment or small molecule or ligand that specifically binds to HVEM and increases one or more of its immunostimulatory activities.

[0509] The various cancer immunotherapy agents described herein can be combined with any one or more of the antibodies, and antigen-binding fragments thereof, described herein, and used according to any one or more of the methods or compositions described herein.

[0510] Certain combination therapies employ one or more chemotherapeutic agents, for example, small molecule chemotherapeutic agents. Non-limiting examples of chemotherapeutic agents include alkylating agents, anti-metabolites, cytotoxic antibiotics, topoisomerase inhibitors (type 1 or type II), an anti-microtubule agents, among others.

[0511] Examples of alkylating agents include nitrogen mustards (e.g., mechlorethamine, cyclophosphamide, mustine, melphalan, chlorambucil, ifosfamide, and busulfan), nitrosoureas (e.g., N-Nitroso-N-methylurea (MNU), carmustine (BCNU), lomustine (CCNU), semustine (MeCCNU), fotemustine, and streptozotocin), tetrazines (e.g., dacarbazine, mitozolomide, and temozolomide), aziridines (e.g., thiotepa, mytomycin, and diaziquone (AZQ)), cisplatins and derivatives thereof (e.g., carboplatin and oxaliplatin), and non-classical alkylating agents (optionally procarbazine and hexamethylmelamine).

[0512] Examples of anti-metabolites include anti-folates (e.g., methotrexate and pemetrexed), fluoropyrimidines (e.g., 5-fluorouracil and capecitabine), deoxynucleoside analogues (e.g., ancitabine, enocitabine, cytarabine, gemcitabine, decitabine, azacitidine, fludarabine, nelarabine, cladribine, clofarabine, fludarabine, and pentostatin), and thiopurines (e.g., thioguanine and mercaptopurine);

[0513] Examples of cytotoxic antibiotics include anthracyclines (e.g., doxorubicin, daunorubicin, epirubicin, idarubicin, pirarubicin, aclarubicin, and mitoxantrone), bleomycins, mitomycin C, mitoxantrone, and actinomycin. Examples of topoisomerase inhibitors include camptothecin, irinotecan, topotecan, etoposide, doxorubicin, mitoxantrone, teniposide, novobiocin, merbarone, and aclarubicin.

[0514] Examples of anti-microtubule agents include taxanes (e.g., paclitaxel and docetaxel) and vinca alkaloids (e.g., vinblastine, vincristine, vindesine, vinorelbine).

[0515] The various chemotherapeutic agents described herein can be combined with any one or more of the antibodies, and antigen-binding fragments thereof, described herein, and used according to any one or more of the methods or compositions described herein.

[0516] Certain combination therapies employ at least one hormonal therapeutic agent. General examples of hormonal therapeutic agents include hormonal agonists and hormonal antagonists. Particular examples of hormonal agonists include progestogen (progestin), corticosteroids (e.g., prednisolone, methylprednisolone, dexamethasone), insulin like growth factors, VEGF derived angiogenic and lymphangiogenic factors (e.g., VEGF-A, VEGF-A145, VEGF-A165, VEGF-C, VEGF-D, PIGF-2), fibroblast growth factor (FGF), galectin, hepatocyte growth factor (HGF), platelet derived growth factor (PDGF), transforming growth factor (TGF)-beta, androgens, estrogens, and somatostatin analogs. Examples of hormonal antagonists include hormone synthesis inhibitors such as aromatase inhibitors and gonadotropin-releasing hormone (GnRH)s agonists (e.g., leuprolide, goserelin, triptorelin, histrelin) including analogs thereof. Also included are hormone receptor antagonist such as selective estrogen receptor modulators (SERMs; e.g., tamoxifen, raloxifene, toremifene) and anti-androgens (e.g., flutamide, bicalutamide, nilutamide).

[0517] Also included are hormonal pathway inhibitors such as antibodies directed against hormonal receptors. Examples include inhibitors of the the IGF receptor (e.g., IGF-IR1) such as cixutumumab, dalotuzumab, figitumumab, ganitumab, istiratumab, and robatumumab; inhibitors of the vascular endothelial growth factor receptors 1, 2 or 3 (VEGFR1, VEGFR2 or VEGFR3) such as alacizumab pegol, bevacizumab, icrucumab, ramucirumab; inhibitors of the TGF-beta receptors R1, R2, and R3 such as fresolimumab and metelimumab; inhibitors of c-Met such as naxitamab; inhibitors of the EGF receptor such as cetuximab, depatuxizumab mafodotin, futuximab, imgatuzumab, laprituximab emtansine, matuzumab, modotuximab, necitumumab, nimotuzumab, panitumumab, tomuzotuximab, and zalutumumab; inhibitors of the FGF receptor such as aprutumab ixadotin and bemarituzumab; and inhibitors of the PDGF receptor such as olaratumab and tovetumab.

[0518] The various hormonal therapeutic agents described herein can be combined with any one or more of the various antibodies, or antigen-binding fragments thereof, described herein, and used according to any one or more of the methods or compositions described herein.

[0519] Certain combination therapies employ at least one kinase inhibitor, including tyrosine kinase inhibitors. Examples of kinase inhibitors include, without limitation, adavosertib, afanitib, aflibercept, axitinib, bevacizumab, bosutinib, cabozantinib, cetuximab, cobimetinib, crizotinib, dasatinib, entrectinib, erdafitinib, erlotinib, fostamitinib, gefitinib, ibrutinib, imatinib, lapatinib, lenvatinib, mubritinib, nilotinib, panitumumab, pazopanib, pegaptanib, ponatinib, ranibizumab, regorafenib, ruxolitinib, sorafenib, sunitinib, SU6656, tofacitinib, trastuzumab, vandetanib, and vemuafenib.

[0520] The various kinase inhibitors described herein can be combined with any one or more of the various antibodies, or antigen-binding fragments thereof, described herein, and used according to any one or more of the methods or compositions described herein.

[0521] In some embodiments, the methods and pharmaceutical compositions described herein increase median survival time of a subject by 4 weeks, 5 weeks, 6 weeks, 7 weeks, 8 weeks, 9 weeks, 10 weeks, 15 weeks, 20 weeks, 25 weeks, 30 weeks, 40 weeks, or longer. In certain embodiments, the methods and pharmaceutical compositions described herein increase median survival time of a subject by 1 year, 2 years, 3 years, or longer. In some embodiments, the methods and pharmaceutical compositions increase progression-free survival by 2 weeks, 3 weeks, 4 weeks, 5 weeks, 6 weeks, 7 weeks, 8 weeks, 9 weeks, 10 weeks or longer. In certain embodiments, the methods and pharmaceutical compositions described herein increase progression-free survival by 1 year, 2 years, 3 years, or longer.

[0522] In certain embodiments, the methods and therapeutic compositions described herein are sufficient to result in tumor regression, as indicated by a statistically significant decrease in the amount of viable tumor, for example, at least a 10%, 20%, 30%, 40%, 50% or greater decrease in tumor mass, or by altered (e.g., decreased with statistical significance) scan dimensions. In certain embodiments, the methods and therapeutic compositions described herein are sufficient to result in stable disease.

[0523] In certain embodiments, the methods and therapeutic compositions described herein are sufficient to result in clinically relevant reduction in symptoms of a particular disease indication known to the skilled clinician.

[0524] For in vivo use, as noted above, for the treatment of human or non-human mammalian disease or testing, the protein agents described herein (e.g., antibodies, or antigen-binding fragments thereof) are incorporated into one or more therapeutic or pharmaceutical or diagnostic compositions prior to administration.

[0525] Thus, certain embodiments relate to pharmaceutical or therapeutic compositions that comprise at least one antibody, or antigen-binding fragment thereof, as described herein. In some instances, a pharmaceutical or therapeutic composition comprises one or more of the protein agents described herein in combination with a pharmaceutically- or physiologically-acceptable carrier or excipient. Certain pharmaceutical or therapeutic compositions further comprise at least one additional agent, for example, a cancer immunotherapy agent, a chemotherapeutic agent, a hormonal therapeutic agent, and/or a kinase inhibitor, as described herein.

[0526] Some therapeutic compositions comprise (and certain methods utilize) only one antibody, or antigen-binding fragment thereof. Certain therapeutic compositions comprise (and certain methods utilize) a mixture of at least two, three, four, or five different antibodies, or antigen-binding fragments thereof.

[0527] In particular embodiments, the pharmaceutical or therapeutic compositions comprising at least one antibody, or antigen-binding fragment thereof, is substantially pure on a protein basis or a weight-weight basis, for example, the composition has a purity of at least about 80%, 85%, 90%, 95%, 98%, or 99% on a protein basis or a weight-weight basis.

[0528] In some embodiments, the protein agents described herein do not form aggregates, have a desired solubility, and/or have an immunogenicity profile that is suitable for use in humans, as known in the art. Thus, in some embodiments, the therapeutic composition comprising a protein agent is substantially aggregate-free. For example, certain compositions comprise less than about 10% (on a protein basis) high molecular weight aggregated proteins, or less than about 5% high molecular weight aggregated proteins, or less than about 4% high molecular weight aggregated proteins, or less than about 3% high molecular weight aggregated proteins, or less than about 2% high molecular weight aggregated proteins, or less than about 1% high molecular weight aggregated proteins. Some compositions comprise a protein agent that is at least about 50%, about 60%, about 70%, about 80%, about 90% or about 95% monodisperse with respect to its apparent molecular mass.

[0529] In some embodiments, a protein agent is concentrated to about or at least about 0.1 mg/ml, 0.2 mg/ml, 0.3 mg/ml, 0.4 mg/ml, 0.5 mg/ml, 0.6, 0.7, 0.8, 0.9, 1 mg/ml, 2 mg/ml, 3 mg/ml, 4 mg/ml, 5 mg/ml, 6 mg/ml, 7 mg/ml, 8 mg/ml, 9 mg/ml, 10 mg/ml, 11, 12, 13, 14 or 15 mg/ml and are formulated for biotherapeutic uses.

[0530] To prepare a therapeutic or pharmaceutical composition, an effective or desired amount of one or more agents is mixed with any pharmaceutical carrier(s) or excipient known to those skilled in the art to be suitable for the particular agent and/or mode of administration. A pharmaceutical carrier may be liquid, semi-liquid or solid. Solutions or suspensions used for parenteral, intradermal, subcutaneous or topical application may include, for example, a sterile diluent (such as water), saline solution (e.g., phosphate buffered saline; PBS), fixed oil, polyethylene glycol, glycerin, propylene glycol or other synthetic solvent; antimicrobial agents (such as benzyl alcohol and methyl parabens); antioxidants (such as ascorbic acid and sodium bisulfite) and chelating agents (such as ethylenediaminetetraacetic acid (EDTA)); buffers (such as acetates, citrates and phosphates). If administered intravenously (e.g., by IV infusion), suitable carriers include physiological saline or phosphate buffered saline (PBS), and solutions containing thickening and solubilizing agents, such as glucose, polyethylene glycol, polypropylene glycol and mixtures thereof.

[0531] Administration of agents described herein, in pure form or in an appropriate therapeutic or pharmaceutical composition, can be carried out via any of the accepted modes of administration of agents for serving similar utilities. The therapeutic or pharmaceutical compositions can be prepared by combining an agent-containing composition with an appropriate physiologically acceptable carrier, diluent or excipient, and may be formulated into preparations in solid, semi-solid, liquid or gaseous forms, such as tablets, capsules, powders, granules, ointments, solutions, suppositories, injections, inhalants, gels, microspheres, and aerosols. In addition, other pharmaceutically active ingredients (including other small molecules as described elsewhere herein) and/or suitable excipients such as salts, buffers and stabilizers may, but need not, be present within the composition.

[0532] Administration may be achieved by a variety of different routes, including oral, parenteral, nasal, intravenous, intradermal, intramuscular, subcutaneous or topical. Preferred modes of administration depend upon the nature of the condition to be treated or prevented. Particular embodiments include administration by IV infusion.

[0533] Carriers can include, for example, pharmaceutically- or physiologically-acceptable carriers, excipients, or stabilizers that are non-toxic to the cell or mammal being exposed thereto at the dosages and concentrations employed. Often the physiologically-acceptable carrier is an aqueous pH buffered solution. Examples of physiologically acceptable carriers include buffers such as phosphate, citrate, and other organic acids; antioxidants including ascorbic acid; low molecular weight (less than about 10 residues) polypeptide; proteins, such as serum albumin, gelatin, or immunoglobulins; hydrophilic polymers such as polyvinylpyrrolidone; amino acids such as glycine, glutamine, asparagine, arginine or lysine; monosaccharides, disaccharides, and other carbohydrates including glucose, mannose, or dextrins; chelating agents such as EDTA; sugar alcohols such as mannitol or sorbitol; salt-forming counterions such as sodium; and/or nonionic surfactants such as polysorbate 20 (TWEEN™) polyethylene glycol (PEG), and poloxamers (PLURONICS™), and the like.

[0534] In some embodiments, one or more agents can be entrapped in microcapsules prepared, for example, by coacervation techniques or by interfacial polymerization (for example, hydroxymethylcellulose or gelatin-microcapsules and poly-(methylmethacylate)microcapsules, respectively), in colloidal drug delivery systems (for example, liposomes, albumin microspheres, microemulsions, nano-particles and nanocapsules), or in macroemulsions. Such techniques are disclosed in Remington's Pharmaceutical Sciences, 16th edition, Oslo, A., Ed., (1980). The particle(s) or liposomes may further comprise other therapeutic or diagnostic agents.

[0535] The precise dosage and duration of treatment is a function of the disease being treated and may be determined empirically using known testing protocols or by testing the compositions in model systems known in the art and extrapolating therefrom. Controlled clinical trials may also be performed. Dosages may also vary with the severity of the condition to be alleviated. A pharmaceutical composition is generally formulated and administered to exert a therapeutically useful effect while minimizing undesirable side effects. The composition may be administered one time, or may be divided into a number of smaller doses to be administered at intervals of time. For any particular subject, specific dosage regimens may be adjusted over time according to the individual need.

[0536] Typical routes of administering these and related therapeutic or pharmaceutical compositions thus include, without limitation, oral, topical, transdermal, inhalation, parenteral, sublingual, buccal, rectal, vaginal, and intranasal. The term parenteral as used herein includes subcutaneous injections, intravenous, intramuscular, intrasternal injection or infusion techniques. Therapeutic or pharmaceutical compositions according to certain embodiments of the present disclosure are formulated so as to allow the active ingredients contained therein to be bioavailable upon administration of the composition to a subject or patient. Compositions that will be administered to a subject or patient may take the form of one or more dosage units, where for example, a tablet may be a single dosage unit, and a container of a herein described agent in aerosol form may hold a plurality of dosage units. Actual methods of preparing such dosage forms are known, or will be apparent, to those skilled in this art; for example, see Remington: The Science and Practice of Pharmacy, 20th Edition (Philadelphia College of Pharmacy and Science, 2000). The composition to be administered will typically contain a therapeutically effective amount of an agent described herein, for treatment of a disease or condition of interest.

[0537] A therapeutic or pharmaceutical composition may be in the form of a solid or liquid. In one embodiment, the carrier(s) are particulate, so that the compositions are, for example, in tablet or powder form. The carrier(s) may be liquid, with the compositions being, for example, an oral oil, injectable liquid or an aerosol, which is useful in, for example, inhalatory administration. When intended for oral administration, the pharmaceutical composition is preferably in either solid or liquid form, where semi-solid, semi-liquid, suspension and gel forms are included within the forms considered herein as either solid or liquid. Certain embodiments include sterile, injectable solutions.

[0538] As a solid composition for oral administration, the pharmaceutical composition may be formulated into a powder, granule, compressed tablet, pill, capsule, chewing gum, wafer or the like. Such a solid composition will typically contain one or more inert diluents or edible carriers. In addition, one or more of the following may be present: binders such as carboxymethylcellulose, ethyl cellulose, microcrystalline cellulose, gum tragacanth or gelatin; excipients such as starch, lactose or dextrins, disintegrating agents such as alginic acid, sodium alginate, Primogel, corn starch and the like; lubricants such as magnesium stearate or Sterotex; glidants such as colloidal silicon dioxide; sweetening agents such as sucrose or saccharin; a flavoring agent such as peppermint, methyl salicylate or orange flavoring; and a coloring agent. When the pharmaceutical composition is in the form of a capsule, for example, a gelatin capsule, it may contain, in addition to materials of the above type, a liquid carrier such as polyethylene glycol or oil.

[0539] The therapeutic or pharmaceutical composition may be in the form of a liquid, for example, an elixir, syrup, solution, emulsion or suspension. The liquid may be for oral administration or for delivery by injection, as two examples. When intended for oral administration, preferred composition contain, in addition to the present compounds, one or more of a sweetening agent, preservatives, dye/colorant and flavor enhancer. In a composition intended to be administered by injection, one or more of a surfactant, preservative, wetting agent, dispersing agent, suspending agent, buffer, stabilizer and isotonic agent may be included.

[0540] The liquid therapeutic or pharmaceutical compositions, whether they be solutions, suspensions or other like form, may include one or more of the following adjuvants: sterile diluents such as water for injection, saline solution, preferably physiological saline, Ringer's solution, isotonic sodium chloride, fixed oils such as synthetic mono or diglycerides which may serve as the solvent or suspending medium, polyethylene glycols, glycerin, propylene glycol or other solvents; antibacterial agents such as benzyl alcohol or methyl paraben; antioxidants such as ascorbic acid or sodium bisulfite; chelating agents such as ethylenediaminetetraacetic acid; buffers such as acetates, citrates or phosphates and agents for the adjustment of tonicity such as sodium chloride or dextrose. The parenteral preparation can be enclosed in ampoules, disposable syringes or multiple dose vials made of glass or plastic. Physiological saline is a preferred adjuvant. An injectable pharmaceutical composition is preferably sterile.

[0541] A liquid therapeutic or pharmaceutical composition intended for either parenteral or oral administration should contain an amount of an agent such that a suitable dosage will be obtained. Typically, this amount is at least 0.01% of the agent of interest in the composition. When intended for oral administration, this amount may be varied to be between 0.1 and about 70% of the weight of the composition. Certain oral therapeutic or pharmaceutical compositions contain between about 4% and about 75% of the agent of interest. In certain embodiments, therapeutic or pharmaceutical compositions and preparations are prepared so that a parenteral dosage unit contains between 0.01 to 10% by weight of the agent of interest prior to dilution.

[0542] The therapeutic or pharmaceutical compositions may be intended for topical administration, in which case the carrier may suitably comprise a solution, emulsion, ointment or gel base. The base, for example, may comprise one or more of the following: petrolatum, lanolin, polyethylene glycols, bee wax, mineral oil, diluents such as water and alcohol, and emulsifiers and stabilizers. Thickening agents may be present in a therapeutic or pharmaceutical composition for topical administration. If intended for transdermal administration, the composition may include a transdermal patch or iontophoresis device.

[0543] The therapeutic or pharmaceutical compositions may be intended for rectal administration, in the form, for example, of a suppository, which will melt in the rectum and release the drug. The composition for rectal administration may contain an oleaginous base as a suitable nonirritating excipient. Such bases include, without limitation, lanolin, cocoa butter, and polyethylene glycol.

[0544] The therapeutic or pharmaceutical composition may include various materials, which modify the physical form of a solid or liquid dosage unit. For example, the composition may include materials that form a coating shell around the active ingredients. The materials that form the coating shell are typically inert, and may be selected from, for example, sugar, shellac, and other enteric coating agents. Alternatively, the active ingredients may be encased in a gelatin capsule. The therapeutic or pharmaceutical compositions in solid or liquid form may include a component that binds to agent and thereby assists in the delivery of the compound. Suitable components that may act in this capacity include monoclonal or polyclonal antibodies, one or more proteins or a liposome.

[0545] The therapeutic or pharmaceutical composition may consist essentially of dosage units that can be administered as an aerosol. The term aerosol is used to denote a variety of systems ranging from those of colloidal nature to systems consisting of pressurized packages. Delivery may be by a liquefied or compressed gas or by a suitable pump system that dispenses the active ingredients. Aerosols may be delivered in single phase, bi-phasic, or tri-phasic systems in order to deliver the active ingredient(s). Delivery of the aerosol includes the necessary container, activators, valves, subcontainers, and the like, which together may form a kit. One of ordinary skill in the art, without undue experimentation may determine preferred aerosols.

[0546] The compositions described herein may be prepared with carriers that protect the agents against rapid elimination from the body, such as time release formulations or coatings. Such carriers include controlled release formulations, such as, but not limited to, implants and microencapsulated delivery systems, and biodegradable, biocompatible polymers, such as ethylene vinyl acetate, polyanhydrides, polyglycolic acid, polyorthoesters, polylactic acid and others known to those of ordinary skill in the art.

[0547] The therapeutic or pharmaceutical compositions may be prepared by methodology well known in the pharmaceutical art. For example, a therapeutic or pharmaceutical composition intended to be administered by injection may comprise one or more of salts, buffers and/or stabilizers, with sterile, distilled water so as to form a solution. A surfactant may be added to facilitate the formation of a homogeneous solution or suspension. Surfactants are compounds that non-covalently interact with the agent so as to facilitate dissolution or homogeneous suspension of the agent in the aqueous delivery system.

[0548] The therapeutic or pharmaceutical compositions may be administered in a therapeutically effective amount, which will vary depending upon a variety of factors including the activity of the specific compound employed; the metabolic stability and length of action of the compound; the age, body weight, general health, sex, and diet of the subject; the mode and time of administration; the rate of excretion; the drug combination; the severity of the particular disorder or condition; and the subject undergoing therapy. In some instances, a therapeutically effective daily dose is (for a 70 kg mammal) from about 0.001 mg/kg (i.e., ˜0.07 mg) to about 100 mg/kg (i.e., ˜7.0 g); preferably a therapeutically effective dose is (for a 70 kg mammal) from about 0.01 mg/kg (i.e., ˜0.7 mg) to about 50 mg/kg (i.e., ˜3.5 g); more preferably a therapeutically effective dose is (for a 70 kg mammal) from about 1 mg/kg (i.e., ˜70 mg) to about 25 mg/kg (i.e., ˜1.75 g). In some embodiments, the therapeutically effective dose is administered on a weekly, bi-weekly, or monthly basis. In specific embodiments, the therapeutically effective dose is administered on a weekly, bi-weekly, or monthly basis, for example, at a dose of about 1-10 or 1-5 mg/kg, or about 1, 2, 3, 4, 5, 6, 7, 8, 9, or 10 mg/kg.

[0549] The combination therapies described herein may include administration of a single pharmaceutical dosage formulation, which contains a protein agent described herein (e.g., antibody, or antigen-binding fragment thereof) and an additional therapeutic agent (e.g., cancer immunotherapy agent, chemotherapeutic agent, hormonal therapeutic agent, kinase inhibitor), as well as administration of compositions comprising a protein agent and an additional therapeutic agent in its own separate pharmaceutical dosage formulation. For example, a protein agent described herein and additional therapeutic agent can be administered to the subject together in a single oral dosage composition such as a tablet or capsule, or each agent administered in separate oral dosage formulations. Similarly, a protein agent described herein and additional therapeutic agent can be administered to the subject together in a single parenteral dosage composition such as in a saline solution or other physiologically acceptable solution, or each agent administered in separate parenteral dosage formulations. As another example, for cell-based therapies, a protein agent described herein can be mixed with the cells prior to administration, administered as part of a separate composition, or both. Where separate dosage formulations are used, the compositions can be administered at essentially the same time, i.e., concurrently, or at separately staggered times, i.e., sequentially and in any order; combination therapy is understood to include all these regimens.

[0550] Also included are patient care kits, comprising (a) at least one protein agent described herein, as described herein; and optionally (b) at least one additional therapeutic agent (e.g., cancer immunotherapy agent, chemotherapeutic agent, hormonal therapeutic agent, kinase inhibitor). In certain kits, (a) and (b) are in separate therapeutic compositions. In some kits, (a) and (b) are in the same therapeutic composition.

[0551] The kits herein may also include a one or more additional therapeutic agents or other components suitable or desired for the indication being treated, or for the desired diagnostic application. The kits herein can also include one or more syringes or other components necessary or desired to facilitate an intended mode of delivery (e.g., stents, implantable depots, etc.).

[0552] In some embodiments, a patient care kit contains separate containers, dividers, or compartments for the composition(s) and informational material(s). For example, the composition(s) can be contained in a bottle, vial, or syringe, and the informational material(s) can be contained in association with the container. In some embodiments, the separate elements of the kit are contained within a single, undivided container. For example, the composition is contained in a bottle, vial or syringe that has attached thereto the informational material in the form of a label. In some embodiments, the kit includes a plurality (e.g., a pack) of individual containers, each containing one or more unit dosage forms (e.g., a dosage form described herein) of a protein agent described herein and optionally at least one additional therapeutic agent. For example, the kit includes a plurality of syringes, ampules, foil packets, or blister packs, each containing a single unit dose of a protein agent described herein and optionally at least one additional therapeutic agent. The containers of the kits can be air tight, waterproof (e.g., impermeable to changes in moisture or evaporation), and/or light-tight.

[0553] The patient care kit optionally includes a device suitable for administration of the composition, e.g., a syringe, inhalant, dropper (e.g., eye dropper), swab (e.g., a cotton swab or wooden swab), or any such delivery device. In some embodiments, the device is an implantable device that dispenses metered doses of the agent(s). Also included are methods of providing a kit, e.g., by combining the components described herein.

[0554] Some embodiments relate, in part, to diagnostic applications for detecting the presence of cells or tissues expressing FAP and/or B7H3. Thus, the present disclosure provides methods of detecting FAP and/or BH73 in a sample, such as detection of cells or tissues expressing FAP and/or B7H3. Such methods can be applied in a variety of known detection formats, including, but not limited to immunohistochemistry (IHC), immunocytochemistry (ICC), in situ hybridization (ISH), whole-mount in situ hybridization (WISH), fluorescent DNA in situ hybridization (FISH), flow cytometry, enzyme immuno-assay (EIA), and enzyme linked immuno-assay (ELISA).

[0555] ISH is a type of hybridization that uses a labeled complementary DNA or RNA strand (i.e., primary binding agent) to localize a specific DNA or RNA sequence in a portion or section of a cell or tissue (in situ), or if the tissue is small enough, the entire tissue (whole mount ISH). This approach is distinct from immunohistochemistry, which localizes proteins in tissue sections using an antibody as a primary binding agent. DNA ISH can be used on genomic DNA to determine the structure of chromosomes. Fluorescent DNA ISH (FISH) can, for example, be used in medical diagnostics to assess chromosomal integrity. RNA ISH (hybridization histochemistry) is used to measure and localize mRNAs and other transcripts within tissue sections or whole mounts.

[0556] The disclosure further provides kits for detecting FAP and/or BH73, or cells or tissues expressing FAP and/or B7H3 in a sample, wherein the kits contain at least one antibody, polynucleotide, vector or host cell as described herein. In certain embodiments, a kit may comprise buffers, enzymes, labels, substrates, beads or other surfaces to which the antibodies of the disclosure are attached, and the like, and instructions for use.

[0557] Expression and Purification Systems

[0558] Certain embodiments include methods and related compositions for expressing and purifying recombinant proteins, such as an antibody, or an antigen-binding fragment thereof, or a fusion protein comprising the same, described herein. Such recombinant proteins can be conveniently prepared using standard protocols as described for example in Sambrook, et al., (1989, supra), in particular Sections 16 and 17; Ausubel et al., (1994, supra), in particular Chapters 10 and 16; and Coligan et al., Current Protocols in Protein Science (John Wiley & Sons, Inc. 1995-1997), in particular Chapters 1, 5 and 6. As one general example, recombinant proteins may be prepared by a procedure including one or more of the steps of: (a) preparing one or more vectors or constructs comprising one or more polynucleotide sequences that encode one or more proteins described herein, which are operably linked to one or more regulatory elements; (b) introducing the one or more vectors or constructs into one or more host cells; (c) culturing the one or more host cell to express the one or more proteins; and (d) isolating the one or more proteins from the host cell.

[0559] To express a desired polypeptide, a nucleotide sequence encoding a first and/or second polypeptide chain of a protein may be inserted into appropriate expression vector(s), i.e., vector(s) which contain the necessary elements for the transcription and translation of the inserted coding sequence. Methods which are well known to those skilled in the art may be used to construct expression vectors containing sequences encoding a polypeptide of interest and appropriate transcriptional and translational control elements. These methods include in vitro recombinant DNA techniques, synthetic techniques, and in vivo genetic recombination. Such techniques are described in Sambrook et al., Molecular Cloning, A Laboratory Manual (1989), and Ausubel et al., Current Protocols in Molecular Biology (1989).

[0560] A variety of expression vector/host systems are known and may be utilized to contain and express polynucleotide sequences. These include, but are not limited to, microorganisms such as bacteria transformed with recombinant bacteriophage, plasmid, or cosmid DNA expression vectors; yeast transformed with yeast expression vectors; insect cell systems infected with virus expression vectors (e.g., baculovirus); plant cell systems transformed with virus expression vectors (e.g., cauliflower mosaic virus, CaMV; tobacco mosaic virus, TMV) or with bacterial expression vectors (e.g., Ti or pBR322 plasmids); or animal cell systems, including mammalian cell and more specifically human cell systems.

[0561] The “control elements” or “regulatory sequences” present in an expression vector are those non-translated regions of the vector—enhancers, promoters, 5′ and 3′ untranslated regions—which interact with host cellular proteins to carry out transcription and translation. Such elements may vary in their strength and specificity. Depending on the vector system and host utilized, any number of suitable transcription and translation elements, including constitutive and inducible promoters, may be used. For example, when cloning in bacterial systems, inducible promoters such as the hybrid lacZ promoter of the PBLUESCRIPT phagemid (Stratagene, La Jolla, Calif.) or PSPORT1 plasmid (Gibco BRL, Gaithersburg, Md.) and the like may be used. In mammalian cell systems, promoters from mammalian genes or from mammalian viruses are generally preferred. If it is necessary to generate a cell line that contains multiple copies of the sequence encoding a polypeptide, vectors based on SV40 or EBV may be advantageously used with an appropriate selectable marker.

[0562] In bacterial systems, a number of expression vectors may be selected depending upon the use intended for the expressed polypeptide. For example, when large quantities are needed, vectors may be used which direct high level expression of antibodies, or antigen-binding fragments thereof, which are readily purified. Such vectors include but are not limited to, the multifunctional E. coli cloning and expression vectors such as BLUESCRIPT (Stratagene), in which the sequence encoding the polypeptide of interest may be ligated into the vector in frame with sequences for the amino-terminal Met and the subsequent 7 residues of β-galactosidase so that a hybrid protein is produced; pIN vectors (Van Heeke & Schuster, J. Biol. Chem. 264:5503 5509 (1989)); and the like. pGEX Vectors (Promega, Madison, Wis.) may also be used to express polypeptides with glutathione S-transferase (GST). In general, such polypeptides are soluble and can easily be purified from lysed cells by adsorption to glutathione-agarose beads followed by elution in the presence of free glutathione. Proteins made in such systems may be designed to include heparin, thrombin, or factor XA protease cleavage sites so that the cloned polypeptide of interest can be released from the GST moiety at will.

[0563] Certain embodiments employ E. coli-based expression systems (see, e.g., Structural Genomics Consortium et al., Nature Methods. 5:135-146, 2008). These and related embodiments may rely partially or totally on ligation-independent cloning (LIC) to produce a suitable expression vector. In specific embodiments, protein expression may be controlled by a T7 RNA polymerase (e.g., pET vector series). These and related embodiments may utilize the expression host strain BL21(DE3), a λDE3 lysogen of BL21 that supports T7-mediated expression and is deficient in lon and ompT proteases for improved target protein stability. Also included are expression host strains carrying plasmids encoding tRNAs rarely used in E. coli, such as ROSETTA™ (DE3) and Rosetta 2 (DE3) strains. Cell lysis and sample handling may also be improved using reagents sold under the trademarks BENZONASE® nuclease and BUGBUSTER® Protein Extraction Reagent. For cell culture, auto-inducing media can improve the efficiency of many expression systems, including high-throughput expression systems. Media of this type (e.g., OVERNIGHT EXPRESS™ Autoinduction System) gradually elicit protein expression through metabolic shift without the addition of artificial inducing agents such as IPTG. Particular embodiments employ hexahistidine tags (such as those sold under the trademark HISTAG® fusions), followed by immobilized metal affinity chromatography (IMAC) purification, or related techniques. In certain aspects, however, clinical grade proteins can be isolated from E. coli inclusion bodies, without or without the use of affinity tags (see, e.g., Shimp et al., Protein Expr Purif. 50:58-67, 2006). As a further example, certain embodiments may employ a cold-shock induced E. coli high-yield production system, because over-expression of proteins in Escherichia coli at low temperature improves their solubility and stability (see, e.g., Qing et al., Nature Biotechnology. 22:877-882, 2004).

[0564] Also included are high-density bacterial fermentation systems. For example, high cell density cultivation of Ralstonia eutropha allows protein production at cell densities of over 150 g/L, and the expression of recombinant proteins at titers exceeding 10 g/L.

[0565] In the yeast Saccharomyces cerevisiae, a number of vectors containing constitutive or inducible promoters such as alpha factor, alcohol oxidase, and PGH may be used. For reviews, see Ausubel et al. (supra) and Grant et al., Methods Enzymol. 153:516-544 (1987). Also included are Pichia pandoris expression systems (see, e.g., Li et al., Nature Biotechnology. 24, 210-215, 2006; and Hamilton et al., Science, 301:1244, 2003). Certain embodiments include yeast systems that are engineered to selectively glycosylate proteins, including yeast that have humanized N-glycosylation pathways, among others (see, e.g., Hamilton et al., Science. 313:1441-1443, 2006; Wildt et al., Nature Reviews Microbiol. 3:119-28, 2005; and Gerngross et al., Nature-Biotechnology. 22:1409-1414, 2004; U.S. Pat. Nos. 7,629,163; 7,326,681; and 7,029,872). Merely by way of example, recombinant yeast cultures can be grown in Fernbach Flasks or 15L, 50L, 100L, and 200L fermentors, among others.

[0566] In cases where plant expression vectors are used, the expression of sequences encoding polypeptides may be driven by any of a number of promoters. For example, viral promoters such as the 35S and 19S promoters of CaMV may be used alone or in combination with the omega leader sequence from TMV (Takamatsu, EMBO J. 6:307-311 (1987)). Alternatively, plant promoters such as the small subunit of RUBISCO or heat shock promoters may be used (Coruzzi et al., EMBO J. 3:1671-1680 (1984); Broglie et al., Science 224:838-843 (1984); and Winter et al., Results Probl. Cell Differ. 17:85-105 (1991)). These constructs can be introduced into plant cells by direct DNA transformation or pathogen-mediated transfection. Such techniques are described in a number of generally available reviews (see, e.g., Hobbs in McGraw Hill, Yearbook of Science and Technology, pp. 191-196 (1992)).

[0567] An insect system may also be used to express a polypeptide of interest. For example, in one such system, Autographa californica nuclear polyhedrosis virus (AcNPV) is used as a vector to express foreign genes in Spodoptera frugiperda cells or in Trichoplusia cells. The sequences encoding the polypeptide may be cloned into a non-essential region of the virus, such as the polyhedrin gene, and placed under control of the polyhedrin promoter. Successful insertion of the polypeptide-encoding sequence will render the polyhedrin gene inactive and produce recombinant virus lacking coat protein. The recombinant viruses may then be used to infect, for example, S. frugiperda cells or Trichoplusia cells in which the polypeptide of interest may be expressed (Engelhard et al., Proc. Natl. Acad. Sci. U.S.A. 91:3224-3227 (1994)). Also included are baculovirus expression systems, including those that utilize SF9, SF21, and T. ni cells (see, e.g., Murphy and Piwnica-Worms, Curr Protoc Protein Sci. Chapter 5:Unit5.4, 2001). Insect systems can provide post-translation modifications that are similar to mammalian systems.

[0568] In mammalian host cells, a number of viral-based expression systems are generally available. For example, in cases where an adenovirus is used as an expression vector, sequences encoding a polypeptide of interest may be ligated into an adenovirus transcription/translation complex consisting of the late promoter and tripartite leader sequence. Insertion in a non-essential E1 or E3 region of the viral genome may be used to obtain a viable virus which is capable of expressing the polypeptide in infected host cells (Logan & Shenk, Proc. Natl. Acad. Sci. U.S.A. 81:3655-3659 (1984)). In addition, transcription enhancers, such as the Rous sarcoma virus (RSV) enhancer, may be used to increase expression in mammalian host cells.

[0569] Examples of useful mammalian host cell lines include monkey kidney CV1 line transformed by SV40 (COS-7, ATCC CRL 1651); human embryonic kidney line (293 or 293 cells sub-cloned for growth in suspension culture, Graham et al., J. Gen Virol. 36:59 (1977)); baby hamster kidney cells (BHK, ATCC CCL 10); mouse sertoli cells (TM4, Mather, Biol. Reprod. 23:243-251 (1980)); monkey kidney cells (CV1 ATCC CCL 70); African green monkey kidney cells (VERO-76, ATCC CRL-1587); human cervical carcinoma cells (HELA, ATCC CCL 2); canine kidney cells (MDCK, ATCC CCL 34); buffalo rat liver cells (BRL 3A, ATCC CRL 1442); human lung cells (W138, ATCC CCL 75); human liver cells (Hep G2, HB 8065); mouse mammary tumor (MMT 060562, ATCC CCL51); TR1 cells (Mather et al., Annals N.Y. Acad. Sci. 383:44-68 (1982)); MRC 5 cells; FS4 cells; and a human hepatoma line (Hep G2). Other useful mammalian host cell lines include Chinese hamster ovary (CHO) cells, including DHFR-CHO cells (Urlaub et al., PNAS USA 77:4216 (1980)); and myeloma cell lines such as NSO and Sp2/0. For a review of certain mammalian host cell lines suitable for protein production, see, e.g., Yazaki and Wu, Methods in Molecular Biology, Vol. 248 (B. K. C Lo, ed., Humana Press, Totowa, N.J., 2003), pp. 255-268. Certain preferred mammalian cell expression systems include CHO and HEK293-cell based expression systems Mammalian expression systems can utilize attached cell lines, for example, in T-flasks, roller bottles, or cell factories, or suspension cultures, for example, in 1L and 5L spinners, 5L, 14L, 40L, 100L and 200L stir tank bioreactors, or 20/50L and 100/200L WAVE bioreactors, among others known in the art.

[0570] Also included is the cell-free expression of proteins. These and related embodiments typically utilize purified RNA polymerase, ribosomes, tRNA and ribonucleotides; these reagents may be produced by extraction from cells or from a cell-based expression system.

[0571] Specific initiation signals may also be used to achieve more efficient translation of sequences encoding a polypeptide of interest. Such signals include the ATG initiation codon and adjacent sequences. In cases where sequences encoding the polypeptide, its initiation codon, and upstream sequences are inserted into the appropriate expression vector, no additional transcriptional or translational control signals may be needed. However, in cases where only coding sequence, or a portion thereof, is inserted, exogenous translational control signals including the ATG initiation codon should be provided. Furthermore, the initiation codon should be in the correct reading frame to ensure translation of the entire insert. Exogenous translational elements and initiation codons may be of various origins, both natural and synthetic. The efficiency of expression may be enhanced by the inclusion of enhancers which are appropriate for the particular cell system which is used, such as those described in the literature (Scharf. et al., Results Probl. Cell Differ. 20:125-162 (1994)).

[0572] In addition, a host cell strain may be chosen for its ability to modulate the expression of the inserted sequences or to process the expressed protein in the desired fashion. Such modifications of the polypeptide include, but are not limited to, post-translational modifications such as acetylation, carboxylation, glycosylation, phosphorylation, lipidation, and acylation. Post-translational processing which cleaves a “prepro” form of the protein may also be used to facilitate correct insertion, folding and/or function. Different host cells such as yeast, CHO, HeLa, MDCK, HEK293, and W138, in addition to bacterial cells, which have or even lack specific cellular machinery and characteristic mechanisms for such post-translational activities, may be chosen to ensure the correct modification and processing of the foreign protein.

[0573] For long-term, high-yield production of recombinant proteins, stable expression is generally preferred. For example, cell lines which stably express a polynucleotide of interest may be transformed using expression vectors which may contain viral origins of replication and/or endogenous expression elements and a selectable marker gene on the same or on a separate vector. Following the introduction of the vector, cells may be allowed to grow for about 1-2 days in an enriched media before they are switched to selective media. The purpose of the selectable marker is to confer resistance to selection, and its presence allows growth and recovery of cells which successfully express the introduced sequences. Resistant clones of stably transformed cells may be proliferated using tissue culture techniques appropriate to the cell type. Transient production, such as by transient transfection or infection, can also be employed. Exemplary mammalian expression systems that are suitable for transient production include HEK293 and CHO-based systems.

[0574] Any number of selection systems may be used to recover transformed or transduced cell lines. These include, but are not limited to, the herpes simplex virus thymidine kinase (Wigler et al., Cell 11:223-232 (1977)) and adenine phosphoribosyltransferase (Lowy et al., Cell 22:817-823 (1990)) genes which can be employed in tk− or aprt− cells, respectively. Also, antimetabolite, antibiotic or herbicide resistance can be used as the basis for selection; for example, dhfr which confers resistance to methotrexate (Wigler et al., Proc. Natl. Acad. Sci. U.S.A. 77:3567-70 (1980)); npt, which confers resistance to the aminoglycosides, neomycin and G-418 (Colbere-Garapin et al., J. Mol. Biol. 150:1-14 (1981)); and als or pat, which confer resistance to chlorsulfuron and phosphinotricin acetyltransferase, respectively (Murry, supra). Additional selectable genes have been described, for example, trpB, which allows cells to utilize indole in place of tryptophan, or hisD, which allows cells to utilize histinol in place of histidine (Hartman & Mulligan, Proc. Natl. Acad. Sci. U.S.A. 85:8047-51 (1988)). The use of visible markers has gained popularity with such markers as green fluorescent protein (GFP) and other fluorescent proteins (e.g., RFP, YFP), anthocyanins, β-glucuronidase and its substrate GUS, and luciferase and its substrate luciferin, being widely used not only to identify transformants, but also to quantify the amount of transient or stable protein expression attributable to a specific vector system (see, e.g., Rhodes et al., Methods Mol. Biol. 55:121-131 (1995)).

[0575] Also included are high-throughput protein production systems, or micro-production systems. Certain aspects may utilize, for example, hexa-histidine fusion tags for protein expression and purification on metal chelate-modified slide surfaces or MagneHis Ni-Particles (see, e.g., Kwon et al., BMC Biotechnol. 9:72, 2009; and Lin et al., Methods Mol Biol. 498:129-41, 2009)). Also included are high-throughput cell-free protein expression systems (see, e.g., Sitaraman et al., Methods Mol Biol. 498:229-44, 2009).

[0576] A variety of protocols for detecting and measuring the expression of polynucleotide-encoded products, using binding agents or antibodies such as polyclonal or monoclonal antibodies specific for the product, are known in the art. Examples include enzyme-linked immunosorbent assay (ELISA), western immunoblots, radioimmunoassays (RIA), and fluorescence activated cell sorting (FACS). These and other assays are described, among other places, in Hampton et al., Serological Methods, a Laboratory Manual (1990) and Maddox et al., J. Exp. Med. 158:1211-1216 (1983).

[0577] A wide variety of labels and conjugation techniques are known by those skilled in the art and may be used in various nucleic acid and amino acid assays. Means for producing labeled hybridization or PCR probes for detecting sequences related to polynucleotides include oligolabeling, nick translation, end-labeling or PCR amplification using a labeled nucleotide. Alternatively, the sequences, or any portions thereof may be cloned into a vector for the production of an mRNA probe. Such vectors are known in the art, are commercially available, and may be used to synthesize RNA probes in vitro by addition of an appropriate RNA polymerase such as T7, T3, or SP6 and labeled nucleotides. These procedures may be conducted using a variety of commercially available kits. Suitable reporter molecules or labels, which may be used include radionuclides, enzymes, fluorescent, chemiluminescent, or chromogenic agents as well as substrates, cofactors, inhibitors, magnetic particles, and the like.

[0578] Host cells transformed with one or more polynucleotide sequences of interest may be cultured under conditions suitable for the expression and recovery of the protein from cell culture. Certain specific embodiments utilize serum free cell expression systems. Examples include HEK293 cells and CHO cells that can grown on serum free medium (see, e.g., Rosser et al., Protein Expr. Purif. 40:237-43, 2005; and U.S. Pat. No. 6,210,922).

[0579] A protein produced by a recombinant cell may be secreted or contained intracellularly depending on the sequence and/or the vector used. As will be understood by those of skill in the art, expression vectors containing polynucleotides may be designed to contain signal sequences which direct secretion of the encoded polypeptide through a prokaryotic or eukaryotic cell membrane. Other recombinant constructions may be used to join sequences encoding a polypeptide of interest to nucleotide sequence encoding a polypeptide domain which will facilitate purification and/or detection of soluble proteins. Examples of such domains include cleavable and non-cleavable affinity purification and epitope tags such as avidin, FLAG tags, poly-histidine tags (e.g., 6×His), cMyc tags, VS-tags, glutathione S-transferase (GST) tags, and others.

[0580] The protein produced by a recombinant cell can be purified and characterized according to a variety of techniques known in the art. Exemplary systems for performing protein purification and analyzing protein purity include fast protein liquid chromatography (FPLC) (e.g., AKTA and Bio-Rad FPLC systems), high-pressure liquid chromatography (HPLC) (e.g., Beckman and Waters HPLC). Exemplary chemistries for purification include ion exchange chromatography (e.g., Q, S), size exclusion chromatography, salt gradients, affinity purification (e.g., Ni, Co, FLAG, maltose, glutathione, protein A/G), gel filtration, reverse-phase, ceramic HYPERD® ion exchange chromatography, and hydrophobic interaction columns (HIC), among others known in the art. Also included are analytical methods such as SDS-PAGE (e.g., coomassie, silver stain), immunoblot, Bradford, and ELISA, which may be utilized during any step of the production or purification process, typically to measure the purity of the protein composition.

[0581] Also included are methods of concentrating the proteins described herein (antibodies, antigen-binding fragments thereof, fusion proteins), and composition comprising concentrated soluble proteins. In some aspects, such concentrated solutions comprise protein(s) at a concentration of about or at least about 5 mg/mL, 8 mg/mL, 10 mg/mL, 15 mg/mL, 20 mg/mL, or more.

[0582] In some aspects, such compositions may be substantially monodisperse, meaning that a protein exists primarily (i.e., at least about 90%, or greater) in one apparent molecular weight form when assessed for example, by size exclusion chromatography, dynamic light scattering, or analytical ultracentrifugation.

[0583] In some aspects, such compositions have a purity (on a protein basis) of at least about 90%, or in some aspects at least about 95% purity, or in some embodiments, at least 98% purity. Purity may be determined via any routine analytical method as known in the art.

[0584] In some aspects, such compositions have a high molecular weight aggregate content of less than about 10%, compared to the total amount of protein present, or in some embodiments such compositions have a high molecular weight aggregate content of less than about 5%, or in some aspects such compositions have a high molecular weight aggregate content of less than about 3%, or in some embodiments a high molecular weight aggregate content of less than about 1%. High molecular weight aggregate content may be determined via a variety of analytical techniques including for example, by size exclusion chromatography, dynamic light scattering, or analytical ultracentrifugation.

[0585] Examples of concentration approaches contemplated herein include lyophilization, which is typically employed when the solution contains few soluble components other than the protein of interest. Lyophilization is often performed after HPLC run, and can remove most or all volatile components from the mixture. Also included are ultrafiltration techniques, which typically employ one or more selective permeable membranes to concentrate a protein solution. The membrane allows water and small molecules to pass through and retains the protein; the solution can be forced against the membrane by mechanical pump, gas pressure, or centrifugation, among other techniques.

[0586] In certain embodiments, a protein in a composition has a purity of at least about 90%, as measured according to routine techniques in the art. In certain embodiments, such as diagnostic compositions or certain pharmaceutical or therapeutic compositions, a protein composition has a purity of at least about 95%, or at least about 97% or 98% or 99%. In some embodiments, such as when being used as reference or research reagents, proteins can be of lesser purity, and may have a purity of at least about 50%, 60%, 70%, or 80%. Purity can be measured overall or in relation to selected components, such as other proteins, e.g., purity on a protein basis.

[0587] Purified proteins can also be characterized according to their biological characteristics. Binding affinity and binding kinetics can be measured according to a variety of techniques known in the art, such as Biacore® and related technologies that utilize surface plasmon resonance (SPR), an optical phenomenon that enables detection of unlabeled interactants in real time. SPR-based biosensors can be used in determination of active concentration, screening and characterization in terms of both affinity and kinetics. The presence or levels of one or more biological activities can be measured according to cell-based assays, including those that utilize at least one IL-2 receptor and/or IL-15 receptor, which is optionally functionally coupled to a readout or indicator, such as a fluorescent or luminescent indicator of biological activity, as described herein.

[0588] In certain embodiments, as noted above, a composition is substantially endotoxin free, including, for example, about 95% endotoxin free, preferably about 99% endotoxin free, and more preferably about 99.99% endotoxin free. The presence of endotoxins can be detected according to routine techniques in the art, as described herein. In specific embodiments, a protein composition is made from a eukaryotic cell such as a mammalian or human cell in substantially serum free media. In certain embodiments, as noted herein, an composition has an endotoxin content of less than about 10 EU/mg of protein, or less than about 5 EU/mg of protein, less than about 3 EU/mg of protein, or less than about 1 EU/mg of protein.

[0589] In certain embodiments, a composition comprises less than about 10% wt/wt high molecular weight aggregates, or less than about 5% wt/wt high molecular weight aggregates, or less than about 2% wt/wt high molecular weight aggregates, or less than about or less than about 1% wt/wt high molecular weight aggregates.

[0590] Also included are protein-based analytical assays and methods, which can be used to assess, for example, protein purity, size, solubility, and degree of aggregation, among other characteristics. Protein purity can be assessed a number of ways. For instance, purity can be assessed based on primary structure, higher order structure, size, charge, hydrophobicity, and glycosylation. Examples of methods for assessing primary structure include N- and C-terminal sequencing and peptide-mapping (see, e.g., Allen et al., Biologicals. 24:255-275, 1996)). Examples of methods for assessing higher order structure include circular dichroism (see, e.g., Kelly et al., Biochim Biophys Acta. 1751:119-139, 2005), fluorescent spectroscopy (see, e.g., Meagher et al., J. Biol. Chem. 273:23283-89, 1998), FT-IR, amide hydrogen-deuterium exchange kinetics, differential scanning calorimetry, NMR spectroscopy, immunoreactivity with conformationally sensitive antibodies. Higher order structure can also be assessed as a function of a variety of parameters such as pH, temperature, or added salts. Examples of methods for assessing protein characteristics such as size include analytical ultracentrifugation and size exclusion HPLC (SEC-HPLC), and exemplary methods for measuring charge include ion-exchange chromatography and isolectric focusing. Hydrophobicity can be assessed, for example, by reverse-phase HPLC and hydrophobic interaction chromatography HPLC. Glycosylation can affect pharmacokinetics (e.g., clearance), conformation or stability, receptor binding, and protein function, and can be assessed, for example, by mass spectrometry and nuclear magnetic resonance (NMR) spectroscopy.

[0591] As noted above, certain embodiments include the use of SEC-HPLC to assess protein characteristics such as purity, size (e.g., size homogeneity) or degree of aggregation, and/or to purify proteins, among other uses. SEC, also including gel-filtration chromatography (GFC) and gel-permeation chromatography (GPC), refers to a chromatographic method in which molecules in solution are separated in a porous material based on their size, or more specifically their hydrodynamic volume, diffusion coefficient, and/or surface properties. The process is generally used to separate biological molecules, and to determine molecular weights and molecular weight distributions of polymers. Typically, a biological or protein sample (such as a protein extract produced according to the protein expression methods provided herein and known in the art) is loaded into a selected size-exclusion column with a defined stationary phase (the porous material), preferably a phase that does not interact with the proteins in the sample. In certain aspects, the stationary phase is composed of inert particles packed into a dense three-dimensional matrix within a glass or steel column. The mobile phase can be pure water, an aqueous buffer, an organic solvent, or a mixture thereof. The stationary-phase particles typically have small pores and/or channels which only allow molecules below a certain size to enter. Large particles are therefore excluded from these pores and channels, and their limited interaction with the stationary phase leads them to elute as a “totally-excluded” peak at the beginning of the experiment. Smaller molecules, which can fit into the pores, are removed from the flowing mobile phase, and the time they spend immobilized in the stationary-phase pores depends, in part, on how far into the pores they penetrate. Their removal from the mobile phase flow causes them to take longer to elute from the column and results in a separation between the particles based on differences in their size. A given size exclusion column has a range of molecular weights that can be separated. Overall, molecules larger than the upper limit will not be trapped by the stationary phase, molecules smaller than the lower limit will completely enter the solid phase and elute as a single band, and molecules within the range will elute at different rates, defined by their properties such as hydrodynamic volume. For examples of these methods in practice with pharmaceutical proteins, see Bruner et al., Journal of Pharmaceutical and Biomedical Analysis. 15: 1929-1935, 1997.

[0592] Protein purity for clinical applications is also discussed, for example, by Anicetti et al. (Trends in Biotechnology. 7:342-349, 1989). More recent techniques for analyzing protein purity include, without limitation, the LabChip GXII, an automated platform for rapid analysis of proteins and nucleic acids, which provides high throughput analysis of titer, sizing, and purity analysis of proteins. In certain non-limiting embodiments, clinical grade proteins can be obtained by utilizing a combination of chromatographic materials in at least two orthogonal steps, among other methods (see, e.g., Therapeutic Proteins: Methods and Protocols. Vol. 308, Eds., Smales and James, Humana Press Inc., 2005). Typically, protein agents are substantially endotoxin-free, as measured according to techniques known in the art and described herein.

[0593] Protein solubility assays are also included. Such assays can be utilized, for example, to determine optimal growth and purification conditions for recombinant production, to optimize the choice of buffer(s), and to optimize the choice of proteins and variants thereof. Solubility or aggregation can be evaluated according to a variety of parameters, including temperature, pH, salts, and the presence or absence of other additives. Examples of solubility screening assays include, without limitation, microplate-based methods of measuring protein solubility using turbidity or other measure as an end point, high-throughput assays for analysis of the solubility of purified recombinant proteins (see, e.g., Stenvall et al., Biochim Biophys Acta. 1752:6-10, 2005), assays that use structural complementation of a genetic marker protein to monitor and measure protein folding and solubility in vivo (see, e.g., Wigley et al., Nature Biotechnology. 19:131-136, 2001), and electrochemical screening of recombinant protein solubility in Escherichia coli using scanning electrochemical microscopy (SECM) (see, e.g., Nagamine et al., Biotechnology and Bioengineering. 96:1008-1013, 2006), among others. Proteins with increased solubility (or reduced aggregation) can be identified or selected for according to routine techniques in the art, including simple in vivo assays for protein solubility (see, e.g., Maxwell et al., Protein Sci. 8:1908-11, 1999).

[0594] Protein solubility and aggregation can also be measured by dynamic light scattering techniques. Aggregation is a general term that encompasses several types of interactions or characteristics, including soluble/insoluble, covalent/noncovalent, reversible/irreversible, and native/denatured interactions and characteristics. For protein therapeutics, the presence of aggregates is typically considered undesirable because of the concern that aggregates may cause an immunogenic reaction (e.g., small aggregates), or may cause adverse events on administration (e.g., particulates). Dynamic light scattering refers to a technique that can be used to determine the size distribution profile of small particles in suspension or polymers such as proteins in solution. This technique, also referred to as photon correlation spectroscopy (PCS) or quasi-elastic light scattering (QELS), uses scattered light to measure the rate of diffusion of the protein particles. Fluctuations of the scattering intensity can be observed due to the Brownian motion of the molecules and particles in solution. This motion data can be conventionally processed to derive a size distribution for the sample, wherein the size is given by the Stokes radius or hydrodynamic radius of the protein particle. The hydrodynamic size depends on both mass and shape (conformation). Dynamic scattering can detect the presence of very small amounts of aggregated protein (<0.01% by weight), even in samples that contain a large range of masses. It can also be used to compare the stability of different formulations, including, for example, applications that rely on real-time monitoring of changes at elevated temperatures. Accordingly, certain embodiments include the use of dynamic light scattering to analyze the solubility and/or presence of aggregates in a sample that contains a protein of the present disclosure.

[0595] Although the foregoing embodiments have been described in some detail by way of illustration and example for purposes of clarity of understanding, it will be readily apparent to one of ordinary skill in the art in light of the teachings of this disclosure that certain changes and modifications may be made thereto without departing from the spirit or scope of the appended claims. The following examples are provided by way of illustration only and not by way of limitation. Those of skill in the art will readily recognize a variety of noncritical parameters that could be changed or modified to yield essentially similar results.

### EXAMPLES

### Example 1

### Engineering of Antibodies to Human FAPα and Human B7H3

[0596] Experiments were performed to engineer antibodies which specifically bind to human FAPα, human B7H3, or both human FAPα and human B7H3. Amino acid sequences of CDRs, heavy chains, and light chains are shown in Table S1 and Table S2, and alignments of the variable regions are show in FIGS. 18A-18L.

[0597] Plasmids coding for heavy chain and light chain were constructed by standard gene synthesis, followed by sub-cloning into pTT5 expression vector. The antibody names relative to the heavy and light chain variable region alignments in FIGS. 18A-18L are provided in Table E1 below

TABLE E1

| Antibody name | Ab ID | VH/VL |
|---|---|---|
| P14471450 | M-1_G1 | VH1/VL1 |
| P14481450 | M-1_G1AAA | VH1/VL1 |
| P14482156 | M-5_G1AAA | VH1/VL5 |
| P14482157 | M-6_G1AAA | VH1/VL6 |
| P21531450 | M-7_G1AAA | VH5/VL1 |
| P21532156 | M-8_G1AAA | VH5/VL5 |
| P21532157 | M-9_G1AAA | VH5/VL6 |
| P21542158 | M-10_G1AAA | VH6/VL7 |
| P21542159 | M-11_G1AAA | VH6/VL8 |
| P21552157 | M-12_G1AAA | VH7/VL6 |
| P21552160 | M-13_G1AAA | VH7/VL9 |
| P21552161 | M-14_G1AAA | VH7/VL10 |
| P24492158 | M-10_G1 | VH6.00/VL7.00 |
| P24502158 | M-15_G1 | VH6.01/VL7.00 |
| P24512158 | M-16_G1 | VH6.02/VL7.00 |
| P24522158 | M-17_G1 | VH6.03/VL7.00 |
| P24532158 | M-18_G1 | VH6.04/VL7.00 |
| P24542158 | M-19_G1 | VH6.05/VL7.00 |
| P24552158 | M-20_G1 | VH6.06/VL7.00 |
| P24562158 | M-21_G1 | VH6.07/VL7.00 |
| P24572158 | M-22_G1 | VH6.08/VL7.00 |
| P24582158 | M-23_G1 | VH6.09/VL7.00 |
| P24592158 | M-24_G1 | VH6.10/VL7.00 |
| P24602158 | M-25_G1 | VH6.11/VL7.00 |
| P24612158 | M-26_G1 | VH6.12/VL7.00 |
| P24622158 | M-27_G1 | VH6.13/VL7.00 |
| P24632158 | M-28_G1 | VH6.14/VL7.00 |
| P24642158 | M-29_G1 | VH6.15/VL7.00 |
| P24652158 | M-30_G1 | VH6.16/VL7.00 |
| P24662158 | M-31_G1 | VH6.17/VL7.00 |
| P24672158 | M-32_G1 | VH6.18/VL7.00 |
| P24682158 | M-33_G1 | VH6.19/VL7.00 |
| P24692158 | M-34_G1 | VH6.20/VL7.00 |
| P24492470 | M-35_G1 | VH6.00/VL7.01 |
| P24492471 | M-36_G1 | VH6.00/VL7.02 |
| P24492472 | M-37_G1 | VH6.00/VL7.03 |
| P24492473 | M-38_G1 | VH6.00/VL7.04 |
| P24492474 | M-39_G1 | VH6.00/VL7.05 |
| P24492475 | M-40_G1 | VH6.00/VL7.06 |
| P24492476 | M-41_G1 | VH6.00/VL7.07 |
| P24492477 | M-42_G1 | VH6.00/VL7.08 |
| P24492478 | M-43_G1 | VH6.00/VL7.09 |
| P24492479 | M-44_G1 | VH6.00/VL7.10 |
| P24492480 | M-45_G1 | VH6.00/VL7.11 |
| P24492481 | M-46_G1 | VH6.00/VL7.12 |
| P24492482 | M-47_G1 | VH6.00/VL7.13 |
| P24492483 | M-48_G1 | VH6.00/VL7.14 |
| P24492484 | M-49_G1 | VH6.00/VL7.15 |
| P24492485 | M-50_G1 | VH6.00/VL7.16 |
| P25352158 | M-51_G1 | VH6.21/VL7.00 |
| P25362158 | M-52_G1 | VH6.22/VL7.00 |
| P24502476 | M-53_G1 | VH6.01/VL7.07 |
| P24602476 | M-54_G1 | VH6.11/VL7.07 |
| P25352476 | M-55_G1 | VH6.21/VL7.07 |
| P25362476 | M-56_G1 | VH6.22/VL7.07 |
| P24502485 | M-57_G1 | VH6.01/VL7.16 |
| P24602485 | M-58_G1 | VH6.11/VL7.16 |
| P25352485 | M-59_G1 | VH6.21/VL7.16 |
| P25362485 | M-60_G1 | VH6.22/VL7.16 |
| P24492537 | M-61_G1 | VH6.00/VL7.17 |
| P24502537 | M-62_G1 | VH6.01/VL7.17 |
| P24602537 | M-63_G1 | VH6.11/VL7.17 |
| P25352537 | M-64_G1 | VH6.21/VL7.17 |
| P25362537 | M-65_G1 | VH6.22/VL7.17 |
| P24492538 | M-66_G1 | VH6.00/VL7.18 |
| P24502538 | M-67_G1 | VH6.01/VL7.18 |
| P24602538 | M-68_G1 | VH6.11/VL7.18 |
| P25352538 | M-69_G1 | VH6.21/VL7.18 |
| P25362538 | M-70_G1 | VH6.22/VL7.18 |
| P24492539 | M-71_G1 | VH6.00/VL7.19 |
| P24502539 | M-72_G1 | VH6.01/VL7.19 |
| P24602539 | M-73_G1 | VH6.11/VL7.19 |
| P25352539 | M-74_G1 | VH6.21/VL7.19 |
| P25362539 | M-75_G1 | VH6.22/VL7.19 |
| P24512476 | M-76_G1 | VH6.02/VL7.07 |
| P24512485 | M-77_G1 | VH6.02/VL7.16 |
| P28742158 | M-78_G1 | VH6.23/VL7.00 |
| P28752158 | M-79_G1 | VH6.24/VL7.00 |
| P28762158 | M-80_G1 | VH6.25/VL7.00 |
| P28772158 | M-81_G1 | VH6.26/VL7.00 |
| P28782158 | M-82_G1 | VH6.27/VL7.00 |
| P28792158 | M-83_G1 | VH6.28/VL7.00 |
| P28802158 | M-84_G1 | VH6.29/VL7.00 |
| P28812158 | M-85_G1 | VH6.30/VL7.00 |
| P28822158 | M-86_G1 | VH6.31/VL7.00 |
| P28832158 | M-87_G1 | VH6.32/VL7.00 |
| P28842158 | M-88_G1 | VH6.33/VL7.00 |
| P28852158 | M-89_G1 | VH6.34/VL7.00 |
| P28862158 | M-90_G1 | VH6.35/VL7.00 |
| P28872158 | M-91_G1 | VH6.36/VL7.00 |
| P28882158 | M-92_G1 | VH6.37/VL7.00 |
| P28892158 | M-93_G1 | VH6.38/VL7.00 |
| P28902158 | M-94_G1 | VH6.39/VL7.00 |
| P28912158 | M-95_G1 | VH6.40/VL7.00 |
| P28922158 | M-96_G1 | VH6.41/VL7.00 |
| P28932158 | M-97_G1 | VH6.42/VL7.00 |
| P28942158 | M-98_G1 | VH6.43/VL7.00 |
| P28952158 | M-99_G1 | VH6.44/VL7.00 |
| P28962158 | M-100_G1 | VH6.45/VL7.00 |
| P28972158 | M-101_G1 | VH6.46/VL7.00 |
| P28982158 | M-102_G1 | VH6.47/VL7.00 |
| P28992158 | M-103_G1 | VH6.48/VL7.00 |
| P29002158 | M-104_G1 | VH6.49/VL7.00 |
| P29012158 | M-105_G1 | VH6.50/VL7.00 |
| P29022158 | M-106_G1 | VH6.51/VL7.00 |
| P29032158 | M-107_G1 | VH6.52/VL7.00 |
| P29042158 | M-108_G1 | VH6.53/VL7.00 |
| P29052158 | M-109_G1 | VH6.54/VL7.00 |
| P29062158 | M-110_G1 | VH6.55/VL7.00 |
| P29072158 | M-111_G1 | VH6.56/VL7.00 |
| P29082158 | M-112_G1 | VH6.57/VL7.00 |

[0598] Production, purification and characterization. Antibodies were produced by transient transfection in Expi293 cells and purified by a one-step purification process of MabSelect SuRe chromatography (GE Healthcare).

[0599] Expi293 expression supernatant was characterized by reduced SDS-PAGE to confirm the expression of antibodies. Representative SDS-APGE results are shown in FIG. 6A. Most of the antibodies showed good expression. Purified proteins were characterized by SDS-PAGE for purity assessment and showed good purity as shown in FIGS. 6B and 6C.

[0600] Purified proteins were also characterized by high performance liquid chromatography (HPLC) for homogeneity assessment. HPLC analysis was performed using Zenix-C column (Sepax) and Acquity Arc (Agilent) according to the manufacturer's instructions. Representative HPLC results are shown in FIGS. 7A-7F. Most of the proteins showed one single peak, indicating good homogeneity.

[0601] ELISA analysis. The binding activity and specificity of expression supernatant and purified antibodies were determined by ELISA. Microtitre plates were coated with purified FAPα protein or goat anti-mouse Fc antibody (Sigma) overnight at 4° C. The next day, plates were washed with PBS and blocked with 3% non-fat dry milk in PBS. B7H3-muFc fusion protein was captured by goat anti-mouse Fc antibody. Serially diluted expression supernatants or antibodies were added for binding to the immobilized antigen. Bound antibodies were detected with peroxidase-conjugated anti-human IgG secondary antibody (Jackson Immunoresearch).

[0602] The results of expression supernatant are summarized in FIGS. 8-14. Most of the expressed antibodies exhibited good binding activity to human FAPα protein as shown in FIGS. 8A-8L and FIGS. 9A-9Q. Some of the expressed antibodies exhibited good binding activity to B7H3 protein as shown in FIGS. 10-13. The results of purified protein are summarized in FIG. 14A-14N. Consistent with the results of expression supernatant, most purified antibodies showed binding activity to human FAPα protein (FIGS. 14A-14E) and some antibodies showed binding activity to B7H3 protein (FIGS. 14F-14N).

[0603] FACS analysis. FACS analysis was performed for purified antibodies. Binding of Expi293 expression supernatant or purified antibodies to FAPα and/or B7H3 expressing cells was determined by flow cytometry. lx 105 cells were incubated for 1 hour at 4° C. with purified antibodies. After washing twice with cold FACS buffer (PBS containing 1% BSA and 0.1% sodium azide), cell surface bound antibody was detected by incubating the cells with phycoerythrin (PE)-labeled anti-human IgG antibody (Jackson Immuno, Cat #109-116-098) for 1 hour at 4° C. Cells were washed twice in FACS buffer and analyzed using Guava EasyCyte HT (Merck Millipore).

[0604] Representative FACS data are shown in FIGS. 15-17. Most of the antibodies exhibited binding activity to human FAPα and many exhibited binding activity to B7H3 protein. Among these antibodies, P28832158 exhibited good binding activity to both human FAPα and B7H3 protein (see FIGS. 17H and 17I).

1. An isolated antibody, or an antigen-binding fragment thereof, which specifically binds to a human fibroblast activation protein-α (FAPα or FAP).

2. The isolated antibody, or antigen-binding fragment thereof, of claim 1, which has dual binding specificity, and which specifically binds to the human FAP and a human B7H3 protein at the same or substantially the same paratope.

3. The isolated antibody, or antigen-binding fragment thereof, of claim 1 or 2, comprising:
a heavy chain variable (V_{H}) region comprising V_{H}CDR1, V_{H}CDR2, and V_{H}CDR3 regions selected from Table A1; and
a light chain variable (V_{L}) region comprising V_{L}CDR1, V_{L}CDR2, and V_{L}CDR3 regions selected from Table A1,
or a variant of said antibody, or antigen-binding fragment thereof, which has up to 1, 2, 3, 4, 5, 6, 7, or 8 total amino acid substitutions across said CDR regions and retains specific binding activity.

4. The isolated antibody, or antigen-binding fragment thereof, of any one of claims 1-3, wherein:
the V_{H}CDR1, a V_{H}CDR2, and V_{H}CDR3 regions respectively comprise SEQ ID NOs: 1-3; and the V_{L}CDR1, V_{L}CDR2, and V_{L}CDR3 regions respectively comprise SEQ ID NOs: 4-6;
the V_{H}CDR1, a V_{H}CDR2, and V_{H}CDR3 regions respectively comprise SEQ ID NOs: 7-9; and the V_{L}CDR1, V_{L}CDR2, and V_{L}CDR3 regions respectively comprise SEQ ID NOs: 10-12;
the V_{H}CDR1, a V_{H}CDR2, and V_{H}CDR3 regions respectively comprise SEQ ID NOs: 13-15; and the V_{L}CDR1, V_{L}CDR2, and V_{L}CDR3 regions respectively comprise SEQ ID NOs: 16-18;
the V_{H}CDR1, a V_{H}CDR2, and V_{H}CDR3 regions respectively comprise SEQ ID NOs: 19-21; and the V_{L}CDR1, V_{L}CDR2, and V_{L}CDR3 regions respectively comprise SEQ ID NOs: 22-24;
the V_{H}CDR1, a V_{H}CDR2, and V_{H}CDR3 regions respectively comprise SEQ ID NOs: 25-27; and the V_{L}CDR1, V_{L}CDR2, and V_{L}CDR3 regions respectively comprise SEQ ID NOs: 28-30;
the V_{H}CDR1, a V_{H}CDR2, and V_{H}CDR3 regions respectively comprise SEQ ID NOs: 31-33; and the V_{L}CDR1, V_{L}CDR2, and V_{L}CDR3 regions respectively comprise SEQ ID NOs: 34-36;
the V_{H}CDR1, a V_{H}CDR2, and V_{H}CDR3 regions respectively comprise SEQ ID NOs: 37-39; and the V_{L}CDR1, V_{L}CDR2, and V_{L}CDR3 regions respectively comprise SEQ ID NOs: 40-42;
the V_{H}CDR1, a V_{H}CDR2, and V_{H}CDR3 regions respectively comprise SEQ ID NOs: 43-45; and the V_{L}CDR1, V_{L}CDR2, and V_{L}CDR3 regions respectively comprise SEQ ID NOs: 46-48;
the V_{H}CDR1, a V_{H}CDR2, and V_{H}CDR3 regions respectively comprise SEQ ID NOs: 49-51; and the V_{L}CDR1, V_{L}CDR2, and V_{L}CDR3 regions respectively comprise SEQ ID NOs: 52-54;
the V_{H}CDR1, a V_{H}CDR2, and V_{H}CDR3 regions respectively comprise SEQ ID NOs: 55-57; and the V_{L}CDR1, V_{L}CDR2, and V_{L}CDR3 regions respectively comprise SEQ ID NOs: 58-60;
the V_{H}CDR1, a V_{H}CDR2, and V_{H}CDR3 regions respectively comprise SEQ ID NOs: 61-63; and the V_{L}CDR1, V_{L}CDR2, and V_{L}CDR3 regions respectively comprise SEQ ID NOs: 64-66;
the V_{H}CDR1, a V_{H}CDR2, and V_{H}CDR3 regions respectively comprise SEQ ID NOs: 67-69; and the V_{L}CDR1, V_{L}CDR2, and V_{L}CDR3 regions respectively comprise SEQ ID NOs: 70-72;
the V_{H}CDR1, a V_{H}CDR2, and V_{H}CDR3 regions respectively comprise SEQ ID NOs: 73-75; and the V_{L}CDR1, V_{L}CDR2, and V_{L}CDR3 regions respectively comprise SEQ ID NOs: 76-78;
the V_{H}CDR1, a V_{H}CDR2, and V_{H}CDR3 regions respectively comprise SEQ ID NOs: 79-81; and the V_{L}CDR1, V_{L}CDR2, and V_{L}CDR3 regions respectively comprise SEQ ID NOs: 82-84;
the V_{H}CDR1, a V_{H}CDR2, and V_{H}CDR3 regions respectively comprise SEQ ID NOs: 85-87; and the V_{L}CDR1, V_{L}CDR2, and V_{L}CDR3 regions respectively comprise SEQ ID NOs: 88-90;
the V_{H}CDR1, a V_{H}CDR2, and V_{H}CDR3 regions respectively comprise SEQ ID NOs: 91-93; and the V_{L}CDR1, V_{L}CDR2, and V_{L}CDR3 regions respectively comprise SEQ ID NOs: 94-96;
the V_{H}CDR1, a V_{H}CDR2, and V_{H}CDR3 regions respectively comprise SEQ ID NOs: 97-99; and the V_{L}CDR1, V_{L}CDR2, and V_{L}CDR3 regions respectively comprise SEQ ID NOs: 100-102;
the V_{H}CDR1, a V_{H}CDR2, and V_{H}CDR3 regions respectively comprise SEQ ID NOs: 103-105; and the V_{L}CDR1, V_{L}CDR2, and V_{L}CDR3 regions respectively comprise SEQ ID NOs: 106-108;
the V_{H}CDR1, a V_{H}CDR2, and V_{H}CDR3 regions respectively comprise SEQ ID NOs: 109-111; and the V_{L}CDR1, V_{L}CDR2, and V_{L}CDR3 regions respectively comprise SEQ ID NOs: 112-114;
the V_{H}CDR1, a V_{H}CDR2, and V_{H}CDR3 regions respectively comprise SEQ ID NOs: 115-117; and the V_{L}CDR1, V_{L}CDR2, and V_{L}CDR3 regions respectively comprise SEQ ID NOs: 118-120;
the V_{H}CDR1, a V_{H}CDR2, and V_{H}CDR3 regions respectively comprise SEQ ID NOs: 121-123; and the V_{L}CDR1, V_{L}CDR2, and V_{L}CDR3 regions respectively comprise SEQ ID NOs: 124-126;
the V_{H}CDR1, a V_{H}CDR2, and V_{H}CDR3 regions respectively comprise SEQ ID NOs: 127-129; and the V_{L}CDR1, V_{L}CDR2, and V_{L}CDR3 regions respectively comprise SEQ ID NOs: 130-132;
the V_{H}CDR1, a V_{H}CDR2, and V_{H}CDR3 regions respectively comprise SEQ ID NOs: 133-135; and the V_{L}CDR1, V_{L}CDR2, and V_{L}CDR3 regions respectively comprise SEQ ID NOs: 136-138;
the V_{H}CDR1, a V_{H}CDR2, and V_{H}CDR3 regions respectively comprise SEQ ID NOs: 139-141; and the V_{L}CDR1, V_{L}CDR2, and V_{L}CDR3 regions respectively comprise SEQ ID NOs: 142-144;
the V_{H}CDR1, a V_{H}CDR2, and V_{H}CDR3 regions respectively comprise SEQ ID NOs: 145-147; and the V_{L}CDR1, V_{L}CDR2, and V_{L}CDR3 regions respectively comprise SEQ ID NOs: 148-150;
the V_{H}CDR1, a V_{H}CDR2, and V_{H}CDR3 regions respectively comprise SEQ ID NOs: 151-153; and the V_{L}CDR1, V_{L}CDR2, and V_{L}CDR3 regions respectively comprise SEQ ID NOs: 154-156;
the V_{H}CDR1, a V_{H}CDR2, and V_{H}CDR3 regions respectively comprise SEQ ID NOs: 157-159; and the V_{L}CDR1, V_{L}CDR2, and V_{L}CDR3 regions respectively comprise SEQ ID NOs: 160-162;
the V_{H}CDR1, a V_{H}CDR2, and V_{H}CDR3 regions respectively comprise SEQ ID NOs: 163-165; and the V_{L}CDR1, V_{L}CDR2, and V_{L}CDR3 regions respectively comprise SEQ ID NOs: 166-168;
the V_{H}CDR1, a V_{H}CDR2, and V_{H}CDR3 regions respectively comprise SEQ ID NOs: 169-171; and the V_{L}CDR1, V_{L}CDR2, and V_{L}CDR3 regions respectively comprise SEQ ID NOs: 172-174;
the V_{H}CDR1, a V_{H}CDR2, and V_{H}CDR3 regions respectively comprise SEQ ID NOs: 175-177; and the V_{L}CDR1, V_{L}CDR2, and V_{L}CDR3 regions respectively comprise SEQ ID NOs: 178-180;
the V_{H}CDR1, a V_{H}CDR2, and V_{H}CDR3 regions respectively comprise SEQ ID NOs: 181-183; and the V_{L}CDR1, V_{L}CDR2, and V_{L}CDR3 regions respectively comprise SEQ ID NOs: 184-186;
the V_{H}CDR1, a V_{H}CDR2, and V_{H}CDR3 regions respectively comprise SEQ ID NOs: 187-189; and the V_{L}CDR1, V_{L}CDR2, and V_{L}CDR3 regions respectively comprise SEQ ID NOs: 190-192;
the V_{H}CDR1, a V_{H}CDR2, and V_{H}CDR3 regions respectively comprise SEQ ID NOs: 193-195; and the V_{L}CDR1, V_{L}CDR2, and V_{L}CDR3 regions respectively comprise SEQ ID NOs: 196-198;
the V_{H}CDR1, a V_{H}CDR2, and V_{H}CDR3 regions respectively comprise SEQ ID NOs: 199-201; and the V_{L}CDR1, V_{L}CDR2, and V_{L}CDR3 regions respectively comprise SEQ ID NOs: 202-204;
the V_{H}CDR1, a V_{H}CDR2, and V_{H}CDR3 regions respectively comprise SEQ ID NOs: 205-207; and the V_{L}CDR1, V_{L}CDR2, and V_{L}CDR3 regions respectively comprise SEQ ID NOs: 208-210;
the V_{H}CDR1, a V_{H}CDR2, and V_{H}CDR3 regions respectively comprise SEQ ID NOs: 211-213; and the V_{L}CDR1, V_{L}CDR2, and V_{L}CDR3 regions respectively comprise SEQ ID NOs: 214-216;
the V_{H}CDR1, a V_{H}CDR2, and V_{H}CDR3 regions respectively comprise SEQ ID NOs: 217-219; and the V_{L}CDR1, V_{L}CDR2, and V_{L}CDR3 regions respectively comprise SEQ ID NOs: 220-222;
the V_{H}CDR1, a V_{H}CDR2, and V_{H}CDR3 regions respectively comprise SEQ ID NOs: 223-225; and the V_{L}CDR1, V_{L}CDR2, and V_{L}CDR3 regions respectively comprise SEQ ID NOs: 226-228;
the V_{H}CDR1, a V_{H}CDR2, and V_{H}CDR3 regions respectively comprise SEQ ID NOs: 229-231; and the V_{L}CDR1, V_{L}CDR2, and V_{L}CDR3 regions respectively comprise SEQ ID NOs: 232-234;
the V_{H}CDR1, a V_{H}CDR2, and V_{H}CDR3 regions respectively comprise SEQ ID NOs: 235-237; and the V_{L}CDR1, V_{L}CDR2, and V_{L}CDR3 regions respectively comprise SEQ ID NOs: 238-240;
the V_{H}CDR1, a V_{H}CDR2, and V_{H}CDR3 regions respectively comprise SEQ ID NOs: 241-243; and the V_{L}CDR1, V_{L}CDR2, and V_{L}CDR3 regions respectively comprise SEQ ID NOs: 244-246;
the V_{H}CDR1, a V_{H}CDR2, and V_{H}CDR3 regions respectively comprise SEQ ID NOs: 247-249; and the V_{L}CDR1, V_{L}CDR2, and V_{L}CDR3 regions respectively comprise SEQ ID NOs: 250-252;
the V_{H}CDR1, a V_{H}CDR2, and V_{H}CDR3 regions respectively comprise SEQ ID NOs: 253-255; and the V_{L}CDR1, V_{L}CDR2, and V_{L}CDR3 regions respectively comprise SEQ ID NOs: 256-258;
the V_{H}CDR1, a V_{H}CDR2, and V_{H}CDR3 regions respectively comprise SEQ ID NOs: 259-261; and the V_{L}CDR1, V_{L}CDR2, and V_{L}CDR3 regions respectively comprise SEQ ID NOs: 262-264;
the V_{H}CDR1, a V_{H}CDR2, and V_{H}CDR3 regions respectively comprise SEQ ID NOs: 265-267; and the V_{L}CDR1, V_{L}CDR2, and V_{L}CDR3 regions respectively comprise SEQ ID NOs: 268-270;
the V_{H}CDR1, a V_{H}CDR2, and V_{H}CDR3 regions respectively comprise SEQ ID NOs: 271-273; and the V_{L}CDR1, V_{L}CDR2, and V_{L}CDR3 regions respectively comprise SEQ ID NOs: 274-276;
the V_{H}CDR1, a V_{H}CDR2, and V_{H}CDR3 regions respectively comprise SEQ ID NOs: 277-279; and the V_{L}CDR1, V_{L}CDR2, and V_{L}CDR3 regions respectively comprise SEQ ID NOs: 280-282;
the V_{H}CDR1, a V_{H}CDR2, and V_{H}CDR3 regions respectively comprise SEQ ID NOs: 283-285; and the V_{L}CDR1, V_{L}CDR2, and V_{L}CDR3 regions respectively comprise SEQ ID NOs: 286-288;
the V_{H}CDR1, a V_{H}CDR2, and V_{H}CDR3 regions respectively comprise SEQ ID NOs: 289-291; and the V_{L}CDR1, V_{L}CDR2, and V_{L}CDR3 regions respectively comprise SEQ ID NOs: 292-294;
the V_{H}CDR1, a V_{H}CDR2, and V_{H}CDR3 regions respectively comprise SEQ ID NOs: 295-297; and the V_{L}CDR1, V_{L}CDR2, and V_{L}CDR3 regions respectively comprise SEQ ID NOs: 298-300;
the V_{H}CDR1, a V_{H}CDR2, and V_{H}CDR3 regions respectively comprise SEQ ID NOs: 301-303; and the V_{L}CDR1, V_{L}CDR2, and V_{L}CDR3 regions respectively comprise SEQ ID NOs: 304-306;
the V_{H}CDR1, a V_{H}CDR2, and V_{H}CDR3 regions respectively comprise SEQ ID NOs: 307-308; and the V_{L}CDR1, V_{L}CDR2, and V_{L}CDR3 regions respectively comprise SEQ ID NOs: 310-312;
the V_{H}CDR1, a V_{H}CDR2, and V_{H}CDR3 regions respectively comprise SEQ ID NOs: 313-315; and the V_{L}CDR1, V_{L}CDR2, and V_{L}CDR3 regions respectively comprise SEQ ID NOs: 316-318;
the V_{H}CDR1, a V_{H}CDR2, and V_{H}CDR3 regions respectively comprise SEQ ID NOs: 319-321; and the V_{L}CDR1, V_{L}CDR2, and V_{L}CDR3 regions respectively comprise SEQ ID NOs: 322-324;
the V_{H}CDR1, a V_{H}CDR2, and V_{H}CDR3 regions respectively comprise SEQ ID NOs: 325-327; and the V_{L}CDR1, V_{L}CDR2, and V_{L}CDR3 regions respectively comprise SEQ ID NOs: 328-330;
the V_{H}CDR1, a V_{H}CDR2, and V_{H}CDR3 regions respectively comprise SEQ ID NOs: 331-333; and the V_{L}CDR1, V_{L}CDR2, and V_{L}CDR3 regions respectively comprise SEQ ID NOs: 334-336;
the V_{H}CDR1, a V_{H}CDR2, and V_{H}CDR3 regions respectively comprise SEQ ID NOs: 337-339; and the V_{L}CDR1, V_{L}CDR2, and V_{L}CDR3 regions respectively comprise SEQ ID NOs: 340-342;
the V_{H}CDR1, a V_{H}CDR2, and V_{H}CDR3 regions respectively comprise SEQ ID NOs: 343-345; and the V_{L}CDR1, V_{L}CDR2, and V_{L}CDR3 regions respectively comprise SEQ ID NOs: 346-348;
the V_{H}CDR1, a V_{H}CDR2, and V_{H}CDR3 regions respectively comprise SEQ ID NOs: 349-351; and the V_{L}CDR1, V_{L}CDR2, and V_{L}CDR3 regions respectively comprise SEQ ID NOs: 352-354;
the V_{H}CDR1, a V_{H}CDR2, and V_{H}CDR3 regions respectively comprise SEQ ID NOs: 355-357; and the V_{L}CDR1, V_{L}CDR2, and V_{L}CDR3 regions respectively comprise SEQ ID NOs: 358-360;
the V_{H}CDR1, a V_{H}CDR2, and V_{H}CDR3 regions respectively comprise SEQ ID NOs: 361-363; and the V_{L}CDR1, V_{L}CDR2, and V_{L}CDR3 regions respectively comprise SEQ ID NOs: 364-366;
the V_{H}CDR1, a V_{H}CDR2, and V_{H}CDR3 regions respectively comprise SEQ ID NOs: 367-369; and the V_{L}CDR1, V_{L}CDR2, and V_{L}CDR3 regions respectively comprise SEQ ID NOs: 370-372;
the V_{H}CDR1, a V_{H}CDR2, and V_{H}CDR3 regions respectively comprise SEQ ID NOs: 373-375; and the V_{L}CDR1, V_{L}CDR2, and V_{L}CDR3 regions respectively comprise SEQ ID NOs: 376-378;
the V_{H}CDR1, a V_{H}CDR2, and V_{H}CDR3 regions respectively comprise SEQ ID NOs: 379-381; and the V_{L}CDR1, V_{L}CDR2, and V_{L}CDR3 regions respectively comprise SEQ ID NOs: 382-384;
the V_{H}CDR1, a V_{H}CDR2, and V_{H}CDR3 regions respectively comprise SEQ ID NOs: 385-387; and the V_{L}CDR1, V_{L}CDR2, and V_{L}CDR3 regions respectively comprise SEQ ID NOs: 388-390;
the V_{H}CDR1, a V_{H}CDR2, and V_{H}CDR3 regions respectively comprise SEQ ID NOs: 391-393; and the V_{L}CDR1, V_{L}CDR2, and V_{L}CDR3 regions respectively comprise SEQ ID NOs: 394-396;
the V_{H}CDR1, a V_{H}CDR2, and V_{H}CDR3 regions respectively comprise SEQ ID NOs: 397-399; and the V_{L}CDR1, V_{L}CDR2, and V_{L}CDR3 regions respectively comprise SEQ ID NOs: 400-402;
the V_{H}CDR1, a V_{H}CDR2, and V_{H}CDR3 regions respectively comprise SEQ ID NOs: 403-405; and the V_{L}CDR1, V_{L}CDR2, and V_{L}CDR3 regions respectively comprise SEQ ID NOs: 406-408;
the V_{H}CDR1, a V_{H}CDR2, and V_{H}CDR3 regions respectively comprise SEQ ID NOs: 409-411; and the V_{L}CDR1, V_{L}CDR2, and V_{L}CDR3 regions respectively comprise SEQ ID NOs: 412-414;
the V_{H}CDR1, a V_{H}CDR2, and V_{H}CDR3 regions respectively comprise SEQ ID NOs: 415-417; and the V_{L}CDR1, V_{L}CDR2, and V_{L}CDR3 regions respectively comprise SEQ ID NOs: 418-420;
the V_{H}CDR1, a V_{H}CDR2, and V_{H}CDR3 regions respectively comprise SEQ ID NOs: 421-423; and the V_{L}CDR1, V_{L}CDR2, and V_{L}CDR3 regions respectively comprise SEQ ID NOs: 424-426;
the V_{H}CDR1, a V_{H}CDR2, and V_{H}CDR3 regions respectively comprise SEQ ID NOs: 427-429; and the V_{L}CDR1, V_{L}CDR2, and V_{L}CDR3 regions respectively comprise SEQ ID NOs: 430-432;
the V_{H}CDR1, a V_{H}CDR2, and V_{H}CDR3 regions respectively comprise SEQ ID NOs: 433-435; and the V_{L}CDR1, V_{L}CDR2, and V_{L}CDR3 regions respectively comprise SEQ ID NOs: 436-438;
the V_{H}CDR1, a V_{H}CDR2, and V_{H}CDR3 regions respectively comprise SEQ ID NOs: 439-441; and the V_{L}CDR1, V_{L}CDR2, and V_{L}CDR3 regions respectively comprise SEQ ID NOs: 442-444;
the V_{H}CDR1, a V_{H}CDR2, and V_{H}CDR3 regions respectively comprise SEQ ID NOs: 445-447; and the V_{L}CDR1, V_{L}CDR2, and V_{L}CDR3 regions respectively comprise SEQ ID NOs: 448-450;
the V_{H}CDR1, a V_{H}CDR2, and V_{H}CDR3 regions respectively comprise SEQ ID NOs: 451-453; and the V_{L}CDR1, V_{L}CDR2, and V_{L}CDR3 regions respectively comprise SEQ ID NOs: 454-456;
the V_{H}CDR1, a V_{H}CDR2, and V_{H}CDR3 regions respectively comprise SEQ ID NOs: 457-459; and the V_{L}CDR1, V_{L}CDR2, and V_{L}CDR3 regions respectively comprise SEQ ID NOs: 460-462;
the V_{H}CDR1, a V_{H}CDR2, and V_{H}CDR3 regions respectively comprise SEQ ID NOs: 463-465; and the V_{L}CDR1, V_{L}CDR2, and V_{L}CDR3 regions respectively comprise SEQ ID NOs: 466-468;
the V_{H}CDR1, a V_{H}CDR2, and V_{H}CDR3 regions respectively comprise SEQ ID NOs: 469-471; and the V_{L}CDR1, V_{L}CDR2, and V_{L}CDR3 regions respectively comprise SEQ ID NOs: 472-474;
the V_{H}CDR1, a V_{H}CDR2, and V_{H}CDR3 regions respectively comprise SEQ ID NOs: 475-477; and the V_{L}CDR1, V_{L}CDR2, and V_{L}CDR3 regions respectively comprise SEQ ID NOs: 478-480;
the V_{H}CDR1, a V_{H}CDR2, and V_{H}CDR3 regions respectively comprise SEQ ID NOs: 481-483; and the V_{L}CDR1, V_{L}CDR2, and V_{L}CDR3 regions respectively comprise SEQ ID NOs: 484-486;
the V_{H}CDR1, a V_{H}CDR2, and V_{H}CDR3 regions respectively comprise SEQ ID NOs: 487-489; and the V_{L}CDR1, V_{L}CDR2, and V_{L}CDR3 regions respectively comprise SEQ ID NOs: 490-492;
the V_{H}CDR1, a V_{H}CDR2, and V_{H}CDR3 regions respectively comprise SEQ ID NOs: 493-495; and the V_{L}CDR1, V_{L}CDR2, and V_{L}CDR3 regions respectively comprise SEQ ID NOs: 496-498;
the V_{H}CDR1, a V_{H}CDR2, and V_{H}CDR3 regions respectively comprise SEQ ID NOs: 499-501; and the V_{L}CDR1, V_{L}CDR2, and V_{L}CDR3 regions respectively comprise SEQ ID NOs: 502-504;
the V_{H}CDR1, a V_{H}CDR2, and V_{H}CDR3 regions respectively comprise SEQ ID NOs: 505-507; and the V_{L}CDR1, V_{L}CDR2, and V_{L}CDR3 regions respectively comprise SEQ ID NOs: 508-510;
the V_{H}CDR1, a V_{H}CDR2, and V_{H}CDR3 regions respectively comprise SEQ ID NOs: 511-513; and the V_{L}CDR1, V_{L}CDR2, and V_{L}CDR3 regions respectively comprise SEQ ID NOs: 514-516;
the V_{H}CDR1, a V_{H}CDR2, and V_{H}CDR3 regions respectively comprise SEQ ID NOs: 517-519; and the V_{L}CDR1, V_{L}CDR2, and V_{L}CDR3 regions respectively comprise SEQ ID NOs: 520-522;
the V_{H}CDR1, a V_{H}CDR2, and V_{H}CDR3 regions respectively comprise SEQ ID NOs: 523-525; and the V_{L}CDR1, V_{L}CDR2, and V_{L}CDR3 regions respectively comprise SEQ ID NOs: 526-528;
the V_{H}CDR1, a V_{H}CDR2, and V_{H}CDR3 regions respectively comprise SEQ ID NOs: 529-531; and the V_{L}CDR1, V_{L}CDR2, and V_{L}CDR3 regions respectively comprise SEQ ID NOs: 532-534;
the V_{H}CDR1, a V_{H}CDR2, and V_{H}CDR3 regions respectively comprise SEQ ID NOs: 535-537; and the V_{L}CDR1, V_{L}CDR2, and V_{L}CDR3 regions respectively comprise SEQ ID NOs: 538-540;
the V_{H}CDR1, a V_{H}CDR2, and V_{H}CDR3 regions respectively comprise SEQ ID NOs: 541-543; and the V_{L}CDR1, V_{L}CDR2, and V_{L}CDR3 regions respectively comprise SEQ ID NOs: 544-546;
the V_{H}CDR1, a V_{H}CDR2, and V_{H}CDR3 regions respectively comprise SEQ ID NOs: 547-549; and the V_{L}CDR1, V_{L}CDR2, and V_{L}CDR3 regions respectively comprise SEQ ID NOs: 550-552;
the V_{H}CDR1, a V_{H}CDR2, and V_{H}CDR3 regions respectively comprise SEQ ID NOs: 553-555; and the V_{L}CDR1, V_{L}CDR2, and V_{L}CDR3 regions respectively comprise SEQ ID NOs: 556-558;
the V_{H}CDR1, a V_{H}CDR2, and V_{H}CDR3 regions respectively comprise SEQ ID NOs: 559-561; and the V_{L}CDR1, V_{L}CDR2, and V_{L}CDR3 regions respectively comprise SEQ ID NOs: 562-564;
the V_{H}CDR1, a V_{H}CDR2, and V_{H}CDR3 regions respectively comprise SEQ ID NOs: 565-567; and the V_{L}CDR1, V_{L}CDR2, and V_{L}CDR3 regions respectively comprise SEQ ID NOs: 568-570;
the V_{H}CDR1, a V_{H}CDR2, and V_{H}CDR3 regions respectively comprise SEQ ID NOs: 571-573; and the V_{L}CDR1, V_{L}CDR2, and V_{L}CDR3 regions respectively comprise SEQ ID NOs: 574-576;
the V_{H}CDR1, a V_{H}CDR2, and V_{H}CDR3 regions respectively comprise SEQ ID NOs: 577-579; and the V_{L}CDR1, V_{L}CDR2, and V_{L}CDR3 regions respectively comprise SEQ ID NOs: 580-582;
the V_{H}CDR1, a V_{H}CDR2, and V_{H}CDR3 regions respectively comprise SEQ ID NOs: 583-585; and the V_{L}CDR1, V_{L}CDR2, and V_{L}CDR3 regions respectively comprise SEQ ID NOs: 586-588;
the V_{H}CDR1, a V_{H}CDR2, and V_{H}CDR3 regions respectively comprise SEQ ID NOs: 589-591; and the V_{L}CDR1, V_{L}CDR2, and V_{L}CDR3 regions respectively comprise SEQ ID NOs: 592-594;
the V_{H}CDR1, a V_{H}CDR2, and V_{H}CDR3 regions respectively comprise SEQ ID NOs: 595-597; and the V_{L}CDR1, V_{L}CDR2, and V_{L}CDR3 regions respectively comprise SEQ ID NOs: 598-600;
the V_{H}CDR1, a V_{H}CDR2, and V_{H}CDR3 regions respectively comprise SEQ ID NOs: 601-603; and the V_{L}CDR1, V_{L}CDR2, and V_{L}CDR3 regions respectively comprise SEQ ID NOs: 604-606;
the V_{H}CDR1, a V_{H}CDR2, and V_{H}CDR3 regions respectively comprise SEQ ID NOs: 607-609; and the V_{L}CDR1, V_{L}CDR2, and V_{L}CDR3 regions respectively comprise SEQ ID NOs: 610-612;
the V_{H}CDR1, a V_{H}CDR2, and V_{H}CDR3 regions respectively comprise SEQ ID NOs: 613-615; and the V_{L}CDR1, V_{L}CDR2, and V_{L}CDR3 regions respectively comprise SEQ ID NOs: 616-618;
the V_{H}CDR1, a V_{H}CDR2, and V_{H}CDR3 regions respectively comprise SEQ ID NOs: 619-621; and the V_{L}CDR1, V_{L}CDR2, and V_{L}CDR3 regions respectively comprise SEQ ID NOs: 622-624;
the V_{H}CDR1, a V_{H}CDR2, and V_{H}CDR3 regions respectively comprise SEQ ID NOs: 625-627; and the V_{L}CDR1, V_{L}CDR2, and V_{L}CDR3 regions respectively comprise SEQ ID NOs: 628-630;
the V_{H}CDR1, a V_{H}CDR2, and V_{H}CDR3 regions respectively comprise SEQ ID NOs: 631-633; and the V_{L}CDR1, V_{L}CDR2, and V_{L}CDR3 regions respectively comprise SEQ ID NOs: 634-636;
the V_{H}CDR1, a V_{H}CDR2, and V_{H}CDR3 regions respectively comprise SEQ ID NOs: 637-639; and the V_{L}CDR1, V_{L}CDR2, and V_{L}CDR3 regions respectively comprise SEQ ID NOs: 640-642;
the V_{H}CDR1, a V_{H}CDR2, and V_{H}CDR3 regions respectively comprise SEQ ID NOs: 643-645; and the V_{L}CDR1, V_{L}CDR2, and V_{L}CDR3 regions respectively comprise SEQ ID NOs: 646-648;
the V_{H}CDR1, a V_{H}CDR2, and V_{H}CDR3 regions respectively comprise SEQ ID NOs: 649-651; and the V_{L}CDR1, V_{L}CDR2, and V_{L}CDR3 regions respectively comprise SEQ ID NOs: 652-654;
the V_{H}CDR1, a V_{H}CDR2, and V_{H}CDR3 regions respectively comprise SEQ ID NOs: 655-657; and the V_{L}CDR1, V_{L}CDR2, and V_{L}CDR3 regions respectively comprise SEQ ID NOs: 658-660;
the V_{H}CDR1, a V_{H}CDR2, and V_{H}CDR3 regions respectively comprise SEQ ID NOs: 661-663; and the V_{L}CDR1, V_{L}CDR2, and V_{L}CDR3 regions respectively comprise SEQ ID NOs: 664-666;
the V_{H}CDR1, a V_{H}CDR2, and V_{H}CDR3 regions respectively comprise SEQ ID NOs: 667-669; and the V_{L}CDR1, V_{L}CDR2, and V_{L}CDR3 regions respectively comprise SEQ ID NOs: 670-672;
the V_{H}CDR1, a V_{H}CDR2, and V_{H}CDR3 regions respectively comprise SEQ ID NOs: 673-675; and the V_{L}CDR1, V_{L}CDR2, and V_{L}CDR3 regions respectively comprise SEQ ID NOs: 676-678;
the V_{H}CDR1, a V_{H}CDR2, and V_{H}CDR3 regions respectively comprise SEQ ID NOs: 679-681; and the V_{L}CDR1, V_{L}CDR2, and V_{L}CDR3 regions respectively comprise SEQ ID NOs: 682-684;
the V_{H}CDR1, a V_{H}CDR2, and V_{H}CDR3 regions respectively comprise SEQ ID NOs: 685-687; and the V_{L}CDR1, V_{L}CDR2, and V_{L}CDR3 regions respectively comprise SEQ ID NOs: 688-690;
the V_{H}CDR1, a V_{H}CDR2, and V_{H}CDR3 regions respectively comprise SEQ ID NOs: 691-693; and the V_{L}CDR1, V_{L}CDR2, and V_{L}CDR3 regions respectively comprise SEQ ID NOs: 694-696;
the V_{H}CDR1, a V_{H}CDR2, and V_{H}CDR3 regions respectively comprise SEQ ID NOs: 697-699; and the V_{L}CDR1, V_{L}CDR2, and V_{L}CDR3 regions respectively comprise SEQ ID NOs: 700-702;
the V_{H}CDR1, a V_{H}CDR2, and V_{H}CDR3 regions respectively comprise SEQ ID NOs: 703-705; and the V_{L}CDR1, V_{L}CDR2, and V_{L}CDR3 regions respectively comprise SEQ ID NOs: 706-708;
the V_{H}CDR1, a V_{H}CDR2, and V_{H}CDR3 regions respectively comprise SEQ ID NOs: 709-711; and the V_{L}CDR1, V_{L}CDR2, and V_{L}CDR3 regions respectively comprise SEQ ID NOs: 712-714;
the V_{H}CDR1, a V_{H}CDR2, and V_{H}CDR3 regions respectively comprise SEQ ID NOs: 715-717; and the V_{L}CDR1, V_{L}CDR2, and V_{L}CDR3 regions respectively comprise SEQ ID NOs: 718-720;
the V_{H}CDR1, a V_{H}CDR2, and V_{H}CDR3 regions respectively comprise SEQ ID NOs: 721-723; and the V_{L}CDR1, V_{L}CDR2, and V_{L}CDR3 regions respectively comprise SEQ ID NOs: 724-726;
the V_{H}CDR1, a V_{H}CDR2, and V_{H}CDR3 regions respectively comprise SEQ ID NOs: 727-729; and the V_{L}CDR1, V_{L}CDR2, and V_{L}CDR3 regions respectively comprise SEQ ID NOs: 730-732;
the V_{H}CDR1, a V_{H}CDR2, and V_{H}CDR3 regions respectively comprise SEQ ID NOs: 733-735; and the V_{L}CDR1, V_{L}CDR2, and V_{L}CDR3 regions respectively comprise SEQ ID NOs: 736-738;
the V_{H}CDR1, a V_{H}CDR2, and V_{H}CDR3 regions respectively comprise SEQ ID NOs: 739-741; and the V_{L}CDR1, V_{L}CDR2, and V_{L}CDR3 regions respectively comprise SEQ ID NOs: 742-744; or
the V_{H}CDR1, a V_{H}CDR2, and V_{H}CDR3 regions respectively comprise SEQ ID NOs: 745-747; and the V_{L}CDR1, V_{L}CDR2, and V_{L}CDR3 regions respectively comprise SEQ ID NOs: 748-750.

5. The isolated antibody, or antigen-binding fragment thereof, of any one of claims 1-4, wherein the heavy chain comprises a sequence least 80, 85, 90, 95, 97, 98, 99, or 100% identical to a sequence selected from Table A2, optionally wherein the heavy chain has 1, 2, 3, 4, 5, or 6 alterations in the framework regions.

6. The isolated antibody, or antigen-binding fragment thereof, of any one of claims 1-5, wherein the light chain comprises a sequence at least 80, 85, 90, 95, 97, 98, 99, or 100% identical to a sequence selected from Table A2, optionally wherein the light chain has 1, 2, 3, 4, 5, or 6 alterations in the framework regions.

7. The isolated antibody, or antigen-binding fragment thereof, of any one of claims 1-6, wherein:
the heavy chain comprises a sequence at least 80, 85, 90, 95, 97, 98, 99, or 100% identical to SEQ ID NO: 751, 753, 755, 757, 759, 761, 763, 765, 767, 769, 771, 773, 775, 777, 779, 781, 783, 785, 787, 789, 791, 793, 795, 797, 799, 801, 803, 805, 807, 809, 811, 813, 815, 817, 819, 821, 823, 825, 827, 829, 831, 833, 835, 837, 839, 841, 843, 845, 847, 849, 851, 853, 855, 857, 859, 861, 863, 865, 867, 869, 871, 873, 875, 877, 879, 881, 883, 885, 887, 889, 891, 893, 895, 897, 899, 901, 903, 905, 907, 909, 911, 913, 915, 917, 919, 921, 923, 925, 927, 929, 931, 933, 935, 937, 939, 941, 943, 945, 947, 949, 951, 953, 955, 957, 959, 961, 963, 965, 967, 969, 971, 973, 975, 977, 979, 981, 983, 985, 987, 989, 991, 993, 995, 997, 999, 1001, 1003, or 1005;
and the light chain respectively comprises a sequence at least 80, 85, 90, 95, 97, 98, 99, or 100% identical to SEQ ID NO: 752, 754, 756, 758, 760, 762, 764, 766, 768, 770, 772, 774, 776, 778, 780, 782, 784, 786, 788, 790, 792, 794, 796, 798, 800, 802, 804, 806, 808, 810, 812, 814, 816, 818, 820, 822, 824, 826, 828, 830, 832, 834, 836, 838, 840, 842, 844, 846, 848, 850, 852, 854, 856, 858, 860, 862, 864, 866, 868, 870, 872, 874, 876, 878, 880, 882, 884, 886, 888, 890, 892, 894, 896, 898, 900, 902, 904, 906, 908, 910, 912, 914, 916, 918, 920, 922, 924, 926, 928, 930, 932, 934, 936, 938, 940, 942, 944, 946, 948, 950, 952, 954, 956, 958, 960, 962, 964, 966, 968, 970, 972, 974, 976, 978, 980, 982, 984, 986, 988, 990, 992, 994, 996, 998, 1000, 1002, 1004, or 1006.

8. The isolated antibody, or an antigen-binding fragment thereof, of any one of claims 1-7, which specifically binds to human FAP and human B7H3 with comparable binding affinities, optionally wherein the binding affinities for FAP and B7H3 are about or less than about 1.5, 2, 3, 4, 5, 6, 7, 8, 9, or 10-fold relative to each other.

9. The isolated antibody, or an antigen-binding fragment thereof, of any one of claims 1-8, which binds to cell surface-expressed human FAP, and optionally cell surface-expressed human B7H3.

10. The isolated antibody, or an antigen-binding fragment thereof, of any one of claims 1-9, which specifically binds to at least one human FAP peptide epitope selected from Table T1, and which optionally specifically binds to at least one human B7H3 peptide epitope selected from Table T2.

11. The isolated antibody, or antigen-binding fragment thereof, of any one of claims 1-10, which is a monoclonal antibody and/or a humanized antibody, or an antigen-binding fragment thereof.

12. The isolated antibody, or antigen-binding fragment thereof, of any one of claims 1-11, which is a whole antibody, a fragment antigen-binding domain (Fab), a F(ab′)2 domain, a single-chain variable fragment (scFv), a dimeric single-chain variable fragment (di-scFv), a single domain antibody (sdAb), or a bi-specific or multi-specific antibody.

13. The isolated antibody, or antigen-binding fragment thereof, of any one of claims 1-12, comprising an Fc region selected from an IgA (including subclasses IgA1 and IgA2), IgD, IgE, IgG (including subclasses IgG1, IgG2, IgG3, and IgG4), and IgM Fc region, optionally a human Fc region, including hybrids and variants thereof.

14. The isolated antibody, or antigen-binding fragment thereof, of claim 13, comprising an IgG Fc region with high effector function in humans, optionally an IgG1 Fc region or an IgG3 Fc region.

15. The isolated antibody, or antigen-binding fragment thereof, of claim 14, comprising an IgG Fc region with low effector function in humans, optionally an IgG2 Fc region or an IgG4 Fc region.

16. The isolated antibody, or antigen-binding fragment thereof, of any one of claims 1-15, comprising a modified Fc region which has at least one altered effector function and/or pharmacokinetic (PK) characteristic relative to a wild-type Fc region.

17. The isolated antibody, or antigen-binding fragment thereof, of any one of claims 1-16, which specifically binds to the human FAP with a K_{D} of 0.4 nM or lower, and which specifically binds to the human B7H3 protein with a K_{D} of 0.4 nM or lower.

18. The isolated antibody, or antigen-binding fragment thereof, of any one of claims 1-17, which is a bi-specific or multi-specific antibody, comprising a first Fab region according to any one of claims 1-17, and a second Fab region that specifically binds to an additional antigen, optionally a cell surface antigen/receptor expressed on an immune cell or cancer cell, optionally CD3.

19. The isolated antibody, or antigen-binding fragment thereof, of any one of claims 1-18, which is fused via an optional linker to a heterologous effector domain.

20. The isolated antibody, or antigen-binding fragment thereof, of claim 19, wherein the heterologous effector domain comprises an immune cell-stimulatory ligand or domain, an immune cell-inhibitory ligand or domain, or a cytocidal (e.g., tumor cell cytocidal) ligand or domain, optionally selected from interleukin-2 (IL-2), interleukin-15 (IL-15), hybrid IL-2/IL-15, and a TNF superfamily ligand such as TRAIL, 4-1BBL, interleukin-21 (IL-21), IFN-alpha, IFN-beta, CD40, GITR-L, OX40L, and CD70.

21. The isolated antibody, or antigen-binding fragment thereof, of any one of claims 1-18, which is a single-chain variable fragment (scFv) fused via a spacer (hinge) region to a transmembrane domain and an intracellular T-cell signaling domain, to form a chimeric antigen receptor (CAR).

22. An isolated polynucleotide encoding the isolated antibody, or antigen-binding fragment thereof, according to any one of claims 1-21, an expression vector comprising the isolated polynucleotide, or an isolated host cell comprising the vector.

23. A method of producing an antibody, or an antigen-binding fragment thereof, according to any one of claims 1-21, comprising culturing the host cell of claim 22 under culture conditions suitable for the expression of the antibody, or antigen-binding fragment thereof, and isolating the antibody, or antigen-binding fragment thereof, from the culture.

24. A chimeric antigen receptor (CAR) T cell, comprising the CAR of claim 21.

25. A pharmaceutical composition, comprising a physiologically acceptable carrier and an antibody, or antigen-binding fragment thereof, according to any one of claims 1-21, or a CAR T cell according to claim 23.

26. A method for treating a disease in a subject in need thereof, comprising administering to the subject the pharmaceutical composition of claim 25.

27. The method of claim 26, wherein the disease is a cancer.

28. The method of claim 27, wherein the subject has, or is selected for treatment based on having, a cancer associated with increased or aberrant FAP expression.

29. The method of claim 27 or 28, wherein the subject has, or is selected for treatment based on having, a cancer associated with increased or aberrant B7H3 expression.

30. The method of any one of claims 27-29, wherein the cancer is a primary cancer or a metastatic cancer, and is selected from one or more of melanoma (optionally metastatic melanoma), kidney cancer (optionally renal cell carcinoma), pancreatic cancer, bone cancer, prostate cancer, small cell lung cancer, non-small cell lung cancer (NSCLC), mesothelioma, leukemia (optionally lymphocytic leukemia, chronic myelogenous leukemia, acute myeloid leukemia, or relapsed acute myeloid leukemia), multiple myeloma, lymphoma, hepatoma (hepatocellular carcinoma), sarcoma, B-cell malignancy, breast cancer, ovarian cancer, colorectal cancer, glioma, glioblastoma multiforme, meningioma, pituitary adenoma, vestibular schwannoma, primary CNS lymphoma, primitive neuroectodermal tumor (medulloblastoma), bladder cancer, uterine cancer, esophageal cancer, brain cancer, head and neck cancers, cervical cancer, testicular cancer, thyroid cancer, and stomach cancer.

31. The method of claim 30, wherein the metastatic cancer is selected from one or more of:
(a) a bladder cancer which has metastasized to the bone, liver, and/or lungs;
(b) a breast cancer which has metastasized to the bone, brain, liver, and/or lungs;
(c) a colorectal cancer which has metastasized to the liver, lungs, and/or peritoneum;
(d) a kidney cancer which has metastasized to the adrenal glands, bone, brain, liver, and/or lungs;
(e) a lung cancer which has metastasized to the adrenal glands, bone, brain, liver, and/or other lung sites;
(f) a melanoma which has metastasized to the bone, brain, liver, lung, and/or skin/muscle;
(g) a ovarian cancer which has metastasized to the liver, lung, and/or peritoneum;
(h) a pancreatic cancer which has metastasized to the liver, lung, and/or peritoneum;
(i) a prostate cancer which has metastasized to the adrenal glands, bone, liver, and/or lungs;
(j) a stomach cancer which has metastasized to the liver, lung, and/or peritoneum;
(l) a thyroid cancer which has metastasized to the bone, liver, and/or lungs; and
(m) a uterine cancer which has metastasized to the bone, liver, lung, peritoneum, and/or vagina.

32. The method of any one of claims 27-31, wherein the antibody, or antigen-binding fragment thereof, enhances an immune response to the cancer by about, or at least about, 5, 10, 15, 20, 25, 30, 35, 40, 45, 50, 60, 70, 80, 90, 100, 200, 300, 400, 500, 600, 700, 800, 900, 1000, 2000% or more, relative to a control.

33. The method of any one of claims 27-32, wherein the antibody, or antigen-binding fragment thereof, increases cancer cell killing in the subject by about or at least about 5, 10, 15, 20, 25, 30, 35, 40, 45, 50, 60, 70, 80, 90, 100, 200, 300, 400, 500, 600, 700, 800, 900, 1000, 2000% or more relative to an untreated control.

34. The method of any one of claims 27-33, wherein the antibody, or antigen-binding fragment thereof, reduces invasiveness of the cancer by about or at least about 5, 10, 15, 20, 25, 30, 35, 40, 45, 50, 60, 70, 80, 90, 100, 200, 300, 400, 500, 600, 700, 800, 900, 1000, 2000% or more relative to an untreated control.

35. The method of any one of claims 27-34, comprising administering to the subject in need thereof an additional agent selected from one or more of a cancer immunotherapy agent, a chemotherapeutic agent, a hormonal therapeutic agent, and a kinase inhibitor.

36. The method of claim 35, wherein the antibody, or antigen-binding fragment thereof, and the additional agent are administered separately, as separate compositions.

37. The method of claim 35, wherein the antibody, or antigen-binding fragment thereof, and the additional are administered together as part of the same pharmaceutical composition.

38. The method of any one of claims 35-37, wherein the antibody, or antigen-binding fragment thereof, enhances susceptibility of the cancer to the additional agent by about or at least about 5, 10, 15, 20, 25, 30, 35, 40, 45, 50, 60, 70, 80, 90, 100, 200, 300, 400, 500, 600, 700, 800, 900, 1000, 2000% or more relative to the additional agent alone.

39. The method of any one of claims 27-38, comprising administering the pharmaceutical composition to the subject by parenteral administration.

40. The method of claim 39, wherein the parenteral administration is intravenous administration.

41. Use of a pharmaceutical composition of claim 25 in the preparation of a medicament for treating a disease in a subject, optionally wherein the disease is a cancer, optionally wherein the cancer is associated with increased or aberrant FAP and/or B7H3 expression.

42. A pharmaceutical composition of claim 25 for use in treating a disease in a subject, optionally wherein the disease is a cancer, optionally wherein the cancer is associated with increased or aberrant FAP and/or B7H3 expression.

The application's sequence listing, which the Patent Office published only in electronic form, follows.

SEQUENCE LISTING (1016 sequences)

SEQ ID NO: 1 - protein, 5 aa, Artificial Sequence
  MADE IN LAB - P14471450 HEAVY CDR1
ENIIH

SEQ ID NO: 2 - protein, 17 aa, Artificial Sequence
  MADE IN LAB - P14471450 HEAVY CDR2
WFHPGSGSIKYNEKFKD

SEQ ID NO: 3 - protein, 11 aa, Artificial Sequence
  MADE IN LAB - P14471450 HEAVY CDR3
HGGTGRGAMDY

SEQ ID NO: 4 - protein, 15 aa, Artificial Sequence
  MADE IN LAB - P14471450 LIGHT CDR1
RASKSVSTSAYSYMH

SEQ ID NO: 5 - protein, 7 aa, Artificial Sequence
  MADE IN LAB - P14471450 LIGHT CDR2
LASNLES

SEQ ID NO: 6 - protein, 9 aa, Artificial Sequence
  MADE IN LAB - P14471450 LIGHT CDR3
QHSRELPYT

SEQ ID NO: 7 - protein, 5 aa, Artificial Sequence
  MADE IN LAB - P14481450 HEAVY CDR1
ENIIH

SEQ ID NO: 8 - protein, 17 aa, Artificial Sequence
  MADE IN LAB - P14481450 HEAVY CDR2
WFHPGSGSIKYNEKFKD

SEQ ID NO: 9 - protein, 11 aa, Artificial Sequence
  MADE IN LAB - P14481450 HEAVY CDR3
HGGTGRGAMDY

SEQ ID NO: 10 - protein, 15 aa, Artificial Sequence
  MADE IN LAB - P14481450 LIGHT CDR1
RASKSVSTSAYSYMH

SEQ ID NO: 11 - protein, 7 aa, Artificial Sequence
  MADE IN LAB - P14481450 LIGHT CDR2
LASNLES

SEQ ID NO: 12 - protein, 9 aa, Artificial Sequence
  MADE IN LAB - P14481450 LIGHT CDR3
QHSRELPYT

SEQ ID NO: 13 - protein, 5 aa, Artificial Sequence
  MADE IN LAB - P14482156 HEAVY CDR1
ENIIH

SEQ ID NO: 14 - protein, 17 aa, Artificial Sequence
  MADE IN LAB - P14482156 HEAVY CDR2
WFHPGSGSIKYNEKFKD

SEQ ID NO: 15 - protein, 11 aa, Artificial Sequence
  MADE IN LAB - P14482156 HEAVY CDR3
HGGTGRGAMDY

SEQ ID NO: 16 - protein, 15 aa, Artificial Sequence
  MADE IN LAB - P14482156 LIGHT CDR1
RASKSVSTSAYSYMH

SEQ ID NO: 17 - protein, 7 aa, Artificial Sequence
  MADE IN LAB - P14482156 LIGHT CDR2
LASNRES

SEQ ID NO: 18 - protein, 9 aa, Artificial Sequence
  MADE IN LAB - P14482156 LIGHT CDR3
MQSRELPYT

SEQ ID NO: 19 - protein, 5 aa, Artificial Sequence
  MADE IN LAB - P14482157 HEAVY CDR1
ENIIH

SEQ ID NO: 20 - protein, 17 aa, Artificial Sequence
  MADE IN LAB - P14482157 HEAVY CDR2
WFHPGSGSIKYNEKFKD

SEQ ID NO: 21 - protein, 11 aa, Artificial Sequence
  MADE IN LAB - P14482157 HEAVY CDR3
HGGTGRGAMDY

SEQ ID NO: 22 - protein, 15 aa, Artificial Sequence
  MADE IN LAB - P14482157 LIGHT CDR1
RASQSISTSAYSYMH

SEQ ID NO: 23 - protein, 7 aa, Artificial Sequence
  MADE IN LAB - P14482157 LIGHT CDR2
LASNLES

SEQ ID NO: 24 - protein, 9 aa, Artificial Sequence
  MADE IN LAB - P14482157 LIGHT CDR3
QQSRELPYT

SEQ ID NO: 25 - protein, 5 aa, Artificial Sequence
  MADE IN LAB - P21531450 HEAVY CDR1
ENIIH

SEQ ID NO: 26 - protein, 17 aa, Artificial Sequence
  MADE IN LAB - P21531450 HEAVY CDR2
IIHPGSGSIKYSPSFQG

SEQ ID NO: 27 - protein, 11 aa, Artificial Sequence
  MADE IN LAB - P21531450 HEAVY CDR3
HGGTGRGAMDY

SEQ ID NO: 28 - protein, 15 aa, Artificial Sequence
  MADE IN LAB - P21531450 LIGHT CDR1
RASKSVSTSAYSYMH

SEQ ID NO: 29 - protein, 7 aa, Artificial Sequence
  MADE IN LAB - P21531450 LIGHT CDR2
LASNLES

SEQ ID NO: 30 - protein, 9 aa, Artificial Sequence
  MADE IN LAB - P21531450 LIGHT CDR3
QHSRELPYT

SEQ ID NO: 31 - protein, 5 aa, Artificial Sequence
  MADE IN LAB - P21532156 HEAVY CDR1
ENIIH

SEQ ID NO: 32 - protein, 17 aa, Artificial Sequence
  MADE IN LAB - P21532156 HEAVY CDR2
IIHPGSGSIKYSPSFQG

SEQ ID NO: 33 - protein, 11 aa, Artificial Sequence
  MADE IN LAB - P21532156 HEAVY CDR3
HGGTGRGAMDY

SEQ ID NO: 34 - protein, 15 aa, Artificial Sequence
  MADE IN LAB - P21532156 LIGHT CDR1
RASKSVSTSAYSYMH

SEQ ID NO: 35 - protein, 7 aa, Artificial Sequence
  MADE IN LAB - P21532156 LIGHT CDR2
LASNRES

SEQ ID NO: 36 - protein, 9 aa, Artificial Sequence
  MADE IN LAB - P21532156 LIGHT CDR3
MQSRELPYT

SEQ ID NO: 37 - protein, 5 aa, Artificial Sequence
  MADE IN LAB - P21532157 HEAVY CDR1
ENIIH

SEQ ID NO: 38 - protein, 17 aa, Artificial Sequence
  MADE IN LAB - P21532157 HEAVY CDR2
IIHPGSGSIKYSPSFQG

SEQ ID NO: 39 - protein, 11 aa, Artificial Sequence
  MADE IN LAB - P21532157 HEAVY CDR3
HGGTGRGAMDY

SEQ ID NO: 40 - protein, 15 aa, Artificial Sequence
  MADE IN LAB - P21532157 LIGHT CDR1
RASQSISTSAYSYMH

SEQ ID NO: 41 - protein, 7 aa, Artificial Sequence
  MADE IN LAB - P21532157 LIGHT CDR2
LASNLES

SEQ ID NO: 42 - protein, 9 aa, Artificial Sequence
  MADE IN LAB - P21532157 LIGHT CDR3
QQSRELPYT

SEQ ID NO: 43 - protein, 5 aa, Artificial Sequence
  MADE IN LAB - P21542158 HEAVY CDR1
ENIIH

SEQ ID NO: 44 - protein, 17 aa, Artificial Sequence
  MADE IN LAB - P21542158 HEAVY CDR2
WIHPGSGSIKYAQKLQG

SEQ ID NO: 45 - protein, 11 aa, Artificial Sequence
  MADE IN LAB - P21542158 HEAVY CDR3
HGGTGRGAMDY

SEQ ID NO: 46 - protein, 15 aa, Artificial Sequence
  MADE IN LAB - P21542158 LIGHT CDR1
RASQSVSTSAYSYMH

SEQ ID NO: 47 - protein, 7 aa, Artificial Sequence
  MADE IN LAB - P21542158 LIGHT CDR2
LASNLES

SEQ ID NO: 48 - protein, 9 aa, Artificial Sequence
  MADE IN LAB - P21542158 LIGHT CDR3
QQSRELPYT

SEQ ID NO: 49 - protein, 5 aa, Artificial Sequence
  MADE IN LAB - P21542159 HEAVY CDR1
ENIIH

SEQ ID NO: 50 - protein, 17 aa, Artificial Sequence
  MADE IN LAB - P21542159 HEAVY CDR2
WIHPGSGSIKYAQKLQG

SEQ ID NO: 51 - protein, 11 aa, Artificial Sequence
  MADE IN LAB - P21542159 HEAVY CDR3
HGGTGRGAMDY

SEQ ID NO: 52 - protein, 15 aa, Artificial Sequence
  MADE IN LAB - P21542159 LIGHT CDR1
RASQSVSTSAYSYMH

SEQ ID NO: 53 - protein, 7 aa, Artificial Sequence
  MADE IN LAB - P21542159 LIGHT CDR2
LASNRET

SEQ ID NO: 54 - protein, 9 aa, Artificial Sequence
  MADE IN LAB - P21542159 LIGHT CDR3
QQSRELPYT

SEQ ID NO: 55 - protein, 5 aa, Artificial Sequence
  MADE IN LAB - P21552157 HEAVY CDR1
ENIIH

SEQ ID NO: 56 - protein, 17 aa, Artificial Sequence
  MADE IN LAB - P21552157 HEAVY CDR2
AIHPGSGSIKYADSVKG

SEQ ID NO: 57 - protein, 11 aa, Artificial Sequence
  MADE IN LAB - P21552157 HEAVY CDR3
HGGTGRGAMDY

SEQ ID NO: 58 - protein, 15 aa, Artificial Sequence
  MADE IN LAB - P21552157 LIGHT CDR1
RASQSISTSAYSYMH

SEQ ID NO: 59 - protein, 7 aa, Artificial Sequence
  MADE IN LAB - P21552157 LIGHT CDR2
LASNLES

SEQ ID NO: 60 - protein, 9 aa, Artificial Sequence
  MADE IN LAB - P21552157 LIGHT CDR3
QQSRELPYT

SEQ ID NO: 61 - protein, 5 aa, Artificial Sequence
  MADE IN LAB - Clone Name HEAVY CDR1
ENIIH

SEQ ID NO: 62 - protein, 17 aa, Artificial Sequence
  MADE IN LAB - Clone Name HEAVY CDR2
AIHPGSGSIKYADSVKG

SEQ ID NO: 63 - protein, 11 aa, Artificial Sequence
  MADE IN LAB - Clone Name HEAVY CDR3
HGGTGRGAMDY

SEQ ID NO: 64 - protein, 15 aa, Artificial Sequence
  MADE IN LAB - Clone Name LIGHT CDR1
RASQSVSTSAYSYMH

SEQ ID NO: 65 - protein, 7 aa, Artificial Sequence
  MADE IN LAB - Clone NameLIGHT CDR2
LASNLES

SEQ ID NO: 66 - protein, 9 aa, Artificial Sequence
  MADE IN LAB - Clone Name LIGHT CDR3
QQSRELPYT

SEQ ID NO: 67 - protein, 5 aa, Artificial Sequence
  MADE IN LAB - P21552161 HEAVY CDR1
ENIIH

SEQ ID NO: 68 - protein, 17 aa, Artificial Sequence
  MADE IN LAB - P21552161 HEAVY CDR2
AIHPGSGSIKYADSVKG

SEQ ID NO: 69 - protein, 11 aa, Artificial Sequence
  MADE IN LAB - P21552161 HEAVY CDR3
HGGTGRGAMDY

SEQ ID NO: 70 - protein, 15 aa, Artificial Sequence
  MADE IN LAB - P21552161 LIGHT CDR1
RASQSVSTSAYSYMH

SEQ ID NO: 71 - protein, 7 aa, Artificial Sequence
  MADE IN LAB - P21552161 LIGHT CDR2
LASNRET

SEQ ID NO: 72 - protein, 9 aa, Artificial Sequence
  MADE IN LAB - P21552161 LIGHT CDR3
QQSRELPYT

SEQ ID NO: 73 - protein, 5 aa, Artificial Sequence
  MADE IN LAB - P24492158 HEAVY CDR1
ENIIH

SEQ ID NO: 74 - protein, 17 aa, Artificial Sequence
  MADE IN LAB - P24492158 HEAVY CDR2
WIHPGSGSIKYAQKLQG

SEQ ID NO: 75 - protein, 11 aa, Artificial Sequence
  MADE IN LAB - P24492158 HEAVY CDR3
HGGTGRGAMDY

SEQ ID NO: 76 - protein, 15 aa, Artificial Sequence
  MADE IN LAB - P24492158 LIGHT CDR1
RASQSVSTSAYSYMH

SEQ ID NO: 77 - protein, 7 aa, Artificial Sequence
  MADE IN LAB - P24492158 LIGHT CDR2
LASNLES

SEQ ID NO: 78 - protein, 9 aa, Artificial Sequence
  MADE IN LAB - P24492158 LIGHT CDR3
QQSRELPYT

SEQ ID NO: 79 - protein, 5 aa, Artificial Sequence
  MADE IN LAB - P24492470 HEAVY CDR1
ENIIH

SEQ ID NO: 80 - protein, 17 aa, Artificial Sequence
  MADE IN LAB - P24492470 HEAVY CDR2
WIHPGSGSIKYAQKLQG

SEQ ID NO: 81 - protein, 11 aa, Artificial Sequence
  MADE IN LAB - P24492470 HEAVY CDR3
HGGTGRGAMDY

SEQ ID NO: 82 - protein, 15 aa, Artificial Sequence
  MADE IN LAB - P24492470 LIGHT CDR1
RASQSVSASAYSYMH

SEQ ID NO: 83 - protein, 7 aa, Artificial Sequence
  MADE IN LAB - P24492470 LIGHT CDR2
LASNLES

SEQ ID NO: 84 - protein, 9 aa, Artificial Sequence
  MADE IN LAB - P24492470 LIGHT CDR3
QQSRELPYT

SEQ ID NO: 85 - protein, 5 aa, Artificial Sequence
  MADE IN LAB - P24492471 HEAVY CDR1
ENIIH

SEQ ID NO: 86 - protein, 17 aa, Artificial Sequence
  MADE IN LAB - P24492471 HEAVY CDR2
WIHPGSGSIKYAQKLQG

SEQ ID NO: 87 - protein, 11 aa, Artificial Sequence
  MADE IN LAB - P24492471 HEAVY CDR3
HGGTGRGAMDY

SEQ ID NO: 88 - protein, 15 aa, Artificial Sequence
  MADE IN LAB - P24492471 LIGHT CDR1
RASQSVSTAAYSYMH

SEQ ID NO: 89 - protein, 7 aa, Artificial Sequence
  MADE IN LAB - P24492471 LIGHT CDR2
LASNLES

SEQ ID NO: 90 - protein, 9 aa, Artificial Sequence
  MADE IN LAB - P24492471 LIGHT CDR3
QQSRELPYT

SEQ ID NO: 91 - protein, 5 aa, Artificial Sequence
  MADE IN LAB - P24492472 HEAVY CDR1
ENIIH

SEQ ID NO: 92 - protein, 17 aa, Artificial Sequence
  MADE IN LAB - P24492472 HEAVY CDR2
WIHPGSGSIKYAQKLQG

SEQ ID NO: 93 - protein, 11 aa, Artificial Sequence
  MADE IN LAB - P24492472 HEAVY CDR3
HGGTGRGAMDY

SEQ ID NO: 94 - protein, 15 aa, Artificial Sequence
  MADE IN LAB - P24492472 LIGHT CDR1
RASQSVSTSAASYMH

SEQ ID NO: 95 - protein, 7 aa, Artificial Sequence
  MADE IN LAB - P24492472 LIGHT CDR2
LASNLES

SEQ ID NO: 96 - protein, 9 aa, Artificial Sequence
  MADE IN LAB - P24492472 LIGHT CDR3
QQSRELPYT

SEQ ID NO: 97 - protein, 5 aa, Artificial Sequence
  MADE IN LAB - P24492473 HEAVY CDR1
ENIIH

SEQ ID NO: 98 - protein, 17 aa, Artificial Sequence
  MADE IN LAB - P24492473 HEAVY CDR2
WIHPGSGSIKYAQKLQG

SEQ ID NO: 99 - protein, 11 aa, Artificial Sequence
  MADE IN LAB - P24492473 HEAVY CDR3
HGGTGRGAMDY

SEQ ID NO: 100 - protein, 15 aa, Artificial Sequence
  MADE IN LAB - P24492473 LIGHT CDR1
RASQSVSTSAYAYMH

SEQ ID NO: 101 - protein, 7 aa, Artificial Sequence
  MADE IN LAB - P24492473 LIGHT CDR2
LASNLES

SEQ ID NO: 102 - protein, 9 aa, Artificial Sequence
  MADE IN LAB - P24492473 LIGHT CDR3
QQSRELPYT

SEQ ID NO: 103 - protein, 5 aa, Artificial Sequence
  MADE IN LAB - P24492474 HEAVY CDR1
ENIIH

SEQ ID NO: 104 - protein, 17 aa, Artificial Sequence
  MADE IN LAB - P24492474 HEAVY CDR2
WIHPGSGSIKYAQKLQG

SEQ ID NO: 105 - protein, 11 aa, Artificial Sequence
  MADE IN LAB - P24492474 HEAVY CDR3
HGGTGRGAMDY

SEQ ID NO: 106 - protein, 15 aa, Artificial Sequence
  MADE IN LAB - P24492474 LIGHT CDR1
RASQSVSTSAYSAMH

SEQ ID NO: 107 - protein, 7 aa, Artificial Sequence
  MADE IN LAB - P24492474 LIGHT CDR2
LASNLES

SEQ ID NO: 108 - protein, 9 aa, Artificial Sequence
  MADE IN LAB - P24492474 LIGHT CDR3
QQSRELPYT

SEQ ID NO: 109 - protein, 5 aa, Artificial Sequence
  MADE IN LAB - P24492475 HEAVY CDR1
ENIIH

SEQ ID NO: 110 - protein, 17 aa, Artificial Sequence
  MADE IN LAB - P24492475 HEAVY CDR2
WIHPGSGSIKYAQKLQG

SEQ ID NO: 111 - protein, 11 aa, Artificial Sequence
  MADE IN LAB - P24492475 HEAVY CDR3
HGGTGRGAMDY

SEQ ID NO: 112 - protein, 15 aa, Artificial Sequence
  MADE IN LAB - P24492475 LIGHT CDR1
RASQSVSTSAYSYMA

SEQ ID NO: 113 - protein, 7 aa, Artificial Sequence
  MADE IN LAB - P24492475 LIGHT CDR2
LASNLES

SEQ ID NO: 114 - protein, 9 aa, Artificial Sequence
  MADE IN LAB - P24492475 LIGHT CDR3
QQSRELPYT

SEQ ID NO: 115 - protein, 5 aa, Artificial Sequence
  MADE IN LAB - P24492476 HEAVY CDR1
ENIIH

SEQ ID NO: 116 - protein, 17 aa, Artificial Sequence
  MADE IN LAB - P24492476 HEAVY CDR2
WIHPGSGSIKYAQKLQG

SEQ ID NO: 117 - protein, 11 aa, Artificial Sequence
  MADE IN LAB - P24492476 HEAVY CDR3
HGGTGRGAMDY

SEQ ID NO: 118 - protein, 15 aa, Artificial Sequence
  MADE IN LAB - P24492476 LIGHT CDR1
RASQSVSTSAYSYMH

SEQ ID NO: 119 - protein, 7 aa, Artificial Sequence
  MADE IN LAB - P24492476 LIGHT CDR2
AASNLES

SEQ ID NO: 120 - protein, 9 aa, Artificial Sequence
  MADE IN LAB - P24492476 LIGHT CDR3
QQSRELPYT

SEQ ID NO: 121 - protein, 5 aa, Artificial Sequence
  MADE IN LAB - P24492476 HEAVY CDR1
ENIIH

SEQ ID NO: 122 - protein, 17 aa, Artificial Sequence
  MADE IN LAB - P24492476 HEAVY CDR2
WIHPGSGSIKYAQKLQG

SEQ ID NO: 123 - protein, 11 aa, Artificial Sequence
  MADE IN LAB - P24492476 HEAVY CDR3
HGGTGRGAMDY

SEQ ID NO: 124 - protein, 15 aa, Artificial Sequence
  MADE IN LAB - P24492476 LIGHT CDR1
RASQSVSTSAYSYMH

SEQ ID NO: 125 - protein, 7 aa, Artificial Sequence
  MADE IN LAB - P24492476 LIGHT CDR2
LAANLES

SEQ ID NO: 126 - protein, 9 aa, Artificial Sequence
  MADE IN LAB - P24492476 LIGHT CDR3
QQSRELPYT

SEQ ID NO: 127 - protein, 5 aa, Artificial Sequence
  MADE IN LAB - P24492478 HEAVY CDR1
ENIIH

SEQ ID NO: 128 - protein, 17 aa, Artificial Sequence
  MADE IN LAB - P24492478 HEAVY CDR2
WIHPGSGSIKYAQKLQG

SEQ ID NO: 129 - protein, 11 aa, Artificial Sequence
  MADE IN LAB - P24492478 HEAVY CDR3
HGGTGRGAMDY

SEQ ID NO: 130 - protein, 15 aa, Artificial Sequence
  MADE IN LAB - P24492478 LIGHT CDR1
RASQSVSTSAYSYMH

SEQ ID NO: 131 - protein, 7 aa, Artificial Sequence
  MADE IN LAB - P24492478 LIGHT CDR2
LASALES

SEQ ID NO: 132 - protein, 9 aa, Artificial Sequence
  MADE IN LAB - P24492478 LIGHT CDR3
QQSRELPYT

SEQ ID NO: 133 - protein, 5 aa, Artificial Sequence
  MADE IN LAB - P24492479 HEAVY CDR1
ENIIH

SEQ ID NO: 134 - protein, 17 aa, Artificial Sequence
  MADE IN LAB - P24492479 HEAVY CDR2
WIHPGSGSIKYAQKLQG

SEQ ID NO: 135 - protein, 11 aa, Artificial Sequence
  MADE IN LAB - P24492479 HEAVY CDR3
HGGTGRGAMDY

SEQ ID NO: 136 - protein, 15 aa, Artificial Sequence
  MADE IN LAB - P24492479 LIGHT CDR1
RASQSVSTSAYSYMH

SEQ ID NO: 137 - protein, 7 aa, Artificial Sequence
  MADE IN LAB - P24492479 LIGHT CDR2
LASNAES

SEQ ID NO: 138 - protein, 9 aa, Artificial Sequence
  MADE IN LAB - P24492479 LIGHT CDR3
QQSRELPYT

SEQ ID NO: 139 - protein, 5 aa, Artificial Sequence
  MADE IN LAB - P24492480 HEAVY CDR1
ENIIH

SEQ ID NO: 140 - protein, 17 aa, Artificial Sequence
  MADE IN LAB - P24492480 HEAVY CDR2
WIHPGSGSIKYAQKLQG

SEQ ID NO: 141 - protein, 11 aa, Artificial Sequence
  MADE IN LAB - P24492480 HEAVY CDR3
HGGTGRGAMDY

SEQ ID NO: 142 - protein, 15 aa, Artificial Sequence
  MADE IN LAB - P24492480 LIGHT CDR1
RASQSVSTSAYSYMH

SEQ ID NO: 143 - protein, 7 aa, Artificial Sequence
  MADE IN LAB - P24492480 LIGHT CDR2
LASNLAS

SEQ ID NO: 144 - protein, 9 aa, Artificial Sequence
  MADE IN LAB - P24492480 LIGHT CDR3
QQSRELPYT

SEQ ID NO: 145 - protein, 5 aa, Artificial Sequence
  MADE IN LAB - P24492481 HEAVY CDR1
ENIIH

SEQ ID NO: 146 - protein, 17 aa, Artificial Sequence
  MADE IN LAB - P24492481 HEAVY CDR2
WIHPGSGSIKYAQKLQG

SEQ ID NO: 147 - protein, 11 aa, Artificial Sequence
  MADE IN LAB - P24492481 HEAVY CDR3
HGGTGRGAMDY

SEQ ID NO: 148 - protein, 15 aa, Artificial Sequence
  MADE IN LAB - P24492481 LIGHT CDR1
RASQSVSTSAYSYMH

SEQ ID NO: 149 - protein, 7 aa, Artificial Sequence
  MADE IN LAB - P24492481 LIGHT CDR2
LASNLEA

SEQ ID NO: 150 - protein, 9 aa, Artificial Sequence
  MADE IN LAB - P24492481 LIGHT CDR3
QQSRELPYT

SEQ ID NO: 151 - protein, 5 aa, Artificial Sequence
  MADE IN LAB - P24492482 HEAVY CDR1
ENIIH

SEQ ID NO: 152 - protein, 17 aa, Artificial Sequence
  MADE IN LAB - P24492482 HEAVY CDR2
WIHPGSGSIKYAQKLQG

SEQ ID NO: 153 - protein, 11 aa, Artificial Sequence
  MADE IN LAB - P24492482 HEAVY CDR3
HGGTGRGAMDY

SEQ ID NO: 154 - protein, 15 aa, Artificial Sequence
  MADE IN LAB - P24492482 LIGHT CDR1
RASQSVSTSAYSYMH

SEQ ID NO: 155 - protein, 7 aa, Artificial Sequence
  MADE IN LAB - P24492482 LIGHT CDR2
LASNLES

SEQ ID NO: 156 - protein, 9 aa, Artificial Sequence
  MADE IN LAB - P24492482 LIGHT CDR3
QQARELPYT

SEQ ID NO: 157 - protein, 5 aa, Artificial Sequence
  MADE IN LAB - P24492483 HEAVY CDR1
ENIIH

SEQ ID NO: 158 - protein, 17 aa, Artificial Sequence
  MADE IN LAB - P24492483 HEAVY CDR2
WIHPGSGSIKYAQKLQG

SEQ ID NO: 159 - protein, 11 aa, Artificial Sequence
  MADE IN LAB - P24492483 HEAVY CDR3
HGGTGRGAMDY

SEQ ID NO: 160 - protein, 15 aa, Artificial Sequence
  MADE IN LAB - P24492483 LIGHT CDR1
RASQSVSTSAYSYMH

SEQ ID NO: 161 - protein, 7 aa, Artificial Sequence
  MADE IN LAB - P24492483 LIGHT CDR2
LASNLES

SEQ ID NO: 162 - protein, 9 aa, Artificial Sequence
  MADE IN LAB - P24492483 LIGHT CDR3
QQSAELPYT

SEQ ID NO: 163 - protein, 5 aa, Artificial Sequence
  MADE IN LAB - P24492484 HEAVY CDR1
ENIIH

SEQ ID NO: 164 - protein, 17 aa, Artificial Sequence
  MADE IN LAB - P24492484 HEAVY CDR2
WIHPGSGSIKYAQKLQG

SEQ ID NO: 165 - protein, 11 aa, Artificial Sequence
  MADE IN LAB - P24492484 HEAVY CDR3
HGGTGRGAMDY

SEQ ID NO: 166 - protein, 15 aa, Artificial Sequence
  MADE IN LAB - P24492484 LIGHT CDR1
RASQSVSTSAYSYMH

SEQ ID NO: 167 - protein, 7 aa, Artificial Sequence
  MADE IN LAB - P24492484 LIGHT CDR2
LASNLES

SEQ ID NO: 168 - protein, 9 aa, Artificial Sequence
  MADE IN LAB - P24492484 LIGHT CDR3
QQSRALPYT

SEQ ID NO: 169 - protein, 5 aa, Artificial Sequence
  MADE IN LAB - P24492485 HEAVY CDR1
ENIIH

SEQ ID NO: 170 - protein, 17 aa, Artificial Sequence
  MADE IN LAB - P24492485 HEAVY CDR2
WIHPGSGSIKYAQKLQG

SEQ ID NO: 171 - protein, 11 aa, Artificial Sequence
  MADE IN LAB - P24492485 HEAVY CDR3
HGGTGRGAMDY

SEQ ID NO: 172 - protein, 15 aa, Artificial Sequence
  MADE IN LAB - P24492485 LIGHT CDR1
RASQSVSTSAYSYMH

SEQ ID NO: 173 - protein, 7 aa, Artificial Sequence
  MADE IN LAB - P24492485 LIGHT CDR2
LASNLES

SEQ ID NO: 174 - protein, 9 aa, Artificial Sequence
  MADE IN LAB - P24492485 LIGHT CDR3
QQSREAPYT

SEQ ID NO: 175 - protein, 5 aa, Artificial Sequence
  MADE IN LAB - P24492537 HEAVY CDR1
ENIIH

SEQ ID NO: 176 - protein, 17 aa, Artificial Sequence
  MADE IN LAB - P24492537 HEAVY CDR2
WIHPGSGSIKYAQKLQG

SEQ ID NO: 177 - protein, 11 aa, Artificial Sequence
  MADE IN LAB - P24492537 HEAVY CDR3
HGGTGRGAMDY

SEQ ID NO: 178 - protein, 15 aa, Artificial Sequence
  MADE IN LAB - P24492537 LIGHT CDR1
RASQSVSTSAYSYMH

SEQ ID NO: 179 - protein, 7 aa, Artificial Sequence
  MADE IN LAB - P24492537 LIGHT CDR2
AASNLES

SEQ ID NO: 180 - protein, 9 aa, Artificial Sequence
  MADE IN LAB - P24492537 LIGHT CDR3
QQSREAPYT

SEQ ID NO: 181 - protein, 5 aa, Artificial Sequence
  MADE IN LAB - P24492538 HEAVY CDR1
ENIIH

SEQ ID NO: 182 - protein, 17 aa, Artificial Sequence
  MADE IN LAB - P24492538 HEAVY CDR2
WIHPGSGSIKYAQKLQG

SEQ ID NO: 183 - protein, 11 aa, Artificial Sequence
  MADE IN LAB - P24492538 HEAVY CDR3
HGGTGRGAMDY

SEQ ID NO: 184 - protein, 15 aa, Artificial Sequence
  MADE IN LAB - P24492538 LIGHT CDR1
RASQSVSTSAYSYMH

SEQ ID NO: 185 - protein, 7 aa, Artificial Sequence
  MADE IN LAB - P24492538 LIGHT CDR2
GASNLES

SEQ ID NO: 186 - protein, 9 aa, Artificial Sequence
  MADE IN LAB - P24492538 LIGHT CDR3
QQSREAPYT

SEQ ID NO: 187 - protein, 5 aa, Artificial Sequence
  MADE IN LAB - P24492539 HEAVY CDR1
ENIIH

SEQ ID NO: 188 - protein, 17 aa, Artificial Sequence
  MADE IN LAB - P24492539 HEAVY CDR2
WIHPGSGSIKYAQKLQG

SEQ ID NO: 189 - protein, 11 aa, Artificial Sequence
  MADE IN LAB - P24492539 HEAVY CDR3
HGGTGRGAMDY

SEQ ID NO: 190 - protein, 15 aa, Artificial Sequence
  MADE IN LAB - P24492539 LIGHT CDR1
RASQSVSTSAYSYMH

SEQ ID NO: 191 - protein, 7 aa, Artificial Sequence
  MADE IN LAB - P24492539 LIGHT CDR2
GASNLES

SEQ ID NO: 192 - protein, 9 aa, Artificial Sequence
  MADE IN LAB - P24492539 LIGHT CDR3
QQSREYPYT

SEQ ID NO: 193 - protein, 5 aa, Artificial Sequence
  MADE IN LAB - P24502158 HEAVY CDR1
ANIIH

SEQ ID NO: 194 - protein, 17 aa, Artificial Sequence
  MADE IN LAB - P24502158 HEAVY CDR2
WIHPGSGSIKYAQKLQG

SEQ ID NO: 195 - protein, 11 aa, Artificial Sequence
  MADE IN LAB - P24502158 HEAVY CDR3
HGGTGRGAMDY

SEQ ID NO: 196 - protein, 15 aa, Artificial Sequence
  MADE IN LAB - P24502158 LIGHT CDR1
RASQSVSTSAYSYMH

SEQ ID NO: 197 - protein, 6 aa, Artificial Sequence
  MADE IN LAB - P24502158 LIGHT CDR2
ASNLES

SEQ ID NO: 198 - protein, 9 aa, Artificial Sequence
  MADE IN LAB - P24502158 LIGHT CDR3
QQSRELPYT

SEQ ID NO: 199 - protein, 5 aa, Artificial Sequence
  MADE IN LAB - P24502476 HEAVY CDR1
ANIIH

SEQ ID NO: 200 - protein, 17 aa, Artificial Sequence
  MADE IN LAB - P24502476 HEAVY CDR2
WIHPGSGSIKYAQKLQG

SEQ ID NO: 201 - protein, 11 aa, Artificial Sequence
  MADE IN LAB - P24502476 HEAVY CDR3
HGGTGRGAMDY

SEQ ID NO: 202 - protein, 15 aa, Artificial Sequence
  MADE IN LAB - P24502476 LIGHT CDR1
RASQSVSTSAYSYMH

SEQ ID NO: 203 - protein, 7 aa, Artificial Sequence
  MADE IN LAB - P24502476 LIGHT CDR2
AASNLES

SEQ ID NO: 204 - protein, 9 aa, Artificial Sequence
  MADE IN LAB - P24502476 LIGHT CDR3
QQSRELPYT

SEQ ID NO: 205 - protein, 5 aa, Artificial Sequence
  MADE IN LAB - P24502485 HEAVY CDR1
ANIIH

SEQ ID NO: 206 - protein, 17 aa, Artificial Sequence
  MADE IN LAB - P24502485 HEAVY CDR2
WIHPGSGSIKYAQKLQG

SEQ ID NO: 207 - protein, 11 aa, Artificial Sequence
  MADE IN LAB - P24502485 HEAVY CDR3
HGGTGRGAMDY

SEQ ID NO: 208 - protein, 15 aa, Artificial Sequence
  MADE IN LAB - P24502485 LIGHT CDR1
RASQSVSTSAYSYMH

SEQ ID NO: 209 - protein, 7 aa, Artificial Sequence
  MADE IN LAB - P24502485 LIGHT CDR2
LASNLES

SEQ ID NO: 210 - protein, 9 aa, Artificial Sequence
  MADE IN LAB - P24502485 LIGHT CDR3
QQSREAPYT

SEQ ID NO: 211 - protein, 5 aa, Artificial Sequence
  MADE IN LAB - P24502537 HEAVY CDR1
ANIIH

SEQ ID NO: 212 - protein, 17 aa, Artificial Sequence
  MADE IN LAB - P24502537 HEAVY CDR2
WIHPGSGSIKYAQKLQG

SEQ ID NO: 213 - protein, 11 aa, Artificial Sequence
  MADE IN LAB - P24502537 HEAVY CDR3
HGGTGRGAMDY

SEQ ID NO: 214 - protein, 15 aa, Artificial Sequence
  MADE IN LAB - P24502537 LIGHT CDR1
RASQSVSTSAYSYMH

SEQ ID NO: 215 - protein, 7 aa, Artificial Sequence
  MADE IN LAB - P24502537 LIGHT CDR2
AASNLES

SEQ ID NO: 216 - protein, 9 aa, Artificial Sequence
  MADE IN LAB - P24502537 LIGHT CDR3
QQSREAPYT

SEQ ID NO: 217 - protein, 5 aa, Artificial Sequence
  MADE IN LAB - P24502538 HEAVY CDR1
ANIIH

SEQ ID NO: 218 - protein, 17 aa, Artificial Sequence
  MADE IN LAB - P24502538 HEAVY CDR2
WIHPGSGSIKYAQKLQG

SEQ ID NO: 219 - protein, 11 aa, Artificial Sequence
  MADE IN LAB - P24502538 HEAVY CDR3
HGGTGRGAMDY

SEQ ID NO: 220 - protein, 15 aa, Artificial Sequence
  MADE IN LAB - P24502538 LIGHT CDR1
RASQSVSTSAYSYMH

SEQ ID NO: 221 - protein, 7 aa, Artificial Sequence
  MADE IN LAB - P24502538 LIGHT CDR2
GASNLES

SEQ ID NO: 222 - protein, 9 aa, Artificial Sequence
  MADE IN LAB - P24502538 LIGHT CDR3
QQSREAPYT

SEQ ID NO: 223 - protein, 5 aa, Artificial Sequence
  MADE IN LAB - P24502539 HEAVY CDR1
ANIIH

SEQ ID NO: 224 - protein, 17 aa, Artificial Sequence
  MADE IN LAB - P24502539 HEAVY CDR2
WIHPGSGSIKYAQKLQG

SEQ ID NO: 225 - protein, 11 aa, Artificial Sequence
  MADE IN LAB - P24502539 HEAVY CDR3
HGGTGRGAMDY

SEQ ID NO: 226 - protein, 15 aa, Artificial Sequence
  MADE IN LAB - P24502539 LIGHT CDR1
RASQSVSTSAYSYMH

SEQ ID NO: 227 - protein, 7 aa, Artificial Sequence
  MADE IN LAB - P24502539 LIGHT CDR2
GASNLES

SEQ ID NO: 228 - protein, 9 aa, Artificial Sequence
  MADE IN LAB - P24502539 LIGHT CDR3
QQSREYPYT

SEQ ID NO: 229 - protein, 5 aa, Artificial Sequence
  MADE IN LAB - P24512158 HEAVY CDR1
EAIIH

SEQ ID NO: 230 - protein, 17 aa, Artificial Sequence
  MADE IN LAB - P24512158 HEAVY CDR2
WIHPGSGSIKYAQKLQG

SEQ ID NO: 231 - protein, 11 aa, Artificial Sequence
  MADE IN LAB - P24512158 HEAVY CDR3
HGGTGRGAMDY

SEQ ID NO: 232 - protein, 15 aa, Artificial Sequence
  MADE IN LAB - P24512158 LIGHT CDR1
RASQSVSTSAYSYMH

SEQ ID NO: 233 - protein, 7 aa, Artificial Sequence
  MADE IN LAB - P24512158 LIGHT CDR2
LASNLES

SEQ ID NO: 234 - protein, 9 aa, Artificial Sequence
  MADE IN LAB - P24512158 LIGHT CDR3
QQSRELPYT

SEQ ID NO: 235 - protein, 5 aa, Artificial Sequence
  MADE IN LAB - P24512476 HEAVY CDR1
EAIIH

SEQ ID NO: 236 - protein, 17 aa, Artificial Sequence
  MADE IN LAB - P24512476 HEAVY CDR2
WIHPGSGSIKYAQKLQG

SEQ ID NO: 237 - protein, 11 aa, Artificial Sequence
  MADE IN LAB - P24512476 HEAVY CDR3
HGGTGRGAMDY

SEQ ID NO: 238 - protein, 15 aa, Artificial Sequence
  MADE IN LAB - P24512476 LIGHT CDR1
RASQSVSTSAYSYMH

SEQ ID NO: 239 - protein, 7 aa, Artificial Sequence
  MADE IN LAB - P24512476 LIGHT CDR2
AASNLES

SEQ ID NO: 240 - protein, 9 aa, Artificial Sequence
  MADE IN LAB - P24512476 LIGHT CDR3
QQSRELPYT

SEQ ID NO: 241 - protein, 5 aa, Artificial Sequence
  MADE IN LAB - P24512485 HEAVY CDR1
EAIIH

SEQ ID NO: 242 - protein, 17 aa, Artificial Sequence
  MADE IN LAB - P24512485 HEAVY CDR2
WIHPGSGSIKYAQKLQG

SEQ ID NO: 243 - protein, 11 aa, Artificial Sequence
  MADE IN LAB - P24512485 HEAVY CDR3
HGGTGRGAMDY

SEQ ID NO: 244 - protein, 15 aa, Artificial Sequence
  MADE IN LAB - P24512485 LIGHT CDR1
RASQSVSTSAYSYMH

SEQ ID NO: 245 - protein, 7 aa, Artificial Sequence
  MADE IN LAB - P24512485 LIGHT CDR2
LASNLES

SEQ ID NO: 246 - protein, 9 aa, Artificial Sequence
  MADE IN LAB - P24512485 LIGHT CDR3
QQSREAPYT

SEQ ID NO: 247 - protein, 5 aa, Artificial Sequence
  MADE IN LAB - P24522158 HEAVY CDR1
ENAIH

SEQ ID NO: 248 - protein, 17 aa, Artificial Sequence
  MADE IN LAB - P24522158 HEAVY CDR2
WIHPGSGSIKYAQKLQG

SEQ ID NO: 249 - protein, 11 aa, Artificial Sequence
  MADE IN LAB - P24522158 HEAVY CDR3
HGGTGRGAMDY

SEQ ID NO: 250 - protein, 15 aa, Artificial Sequence
  MADE IN LAB - P24522158 LIGHT CDR1
RASQSVSTSAYSYMH

SEQ ID NO: 251 - protein, 7 aa, Artificial Sequence
  MADE IN LAB - P24522158 LIGHT CDR2
LASNLES

SEQ ID NO: 252 - protein, 9 aa, Artificial Sequence
  MADE IN LAB - P24522158 LIGHT CDR3
QQSRELPYT

SEQ ID NO: 253 - protein, 5 aa, Artificial Sequence
  MADE IN LAB - P24532158 HEAVY CDR1
ENIAH

SEQ ID NO: 254 - protein, 17 aa, Artificial Sequence
  MADE IN LAB - P24532158 HEAVY CDR2
WIHPGSGSIKYAQKLQG

SEQ ID NO: 255 - protein, 11 aa, Artificial Sequence
  MADE IN LAB - P24532158 HEAVY CDR3
HGGTGRGAMDY

SEQ ID NO: 256 - protein, 15 aa, Artificial Sequence
  MADE IN LAB - P24532158 LIGHT CDR1
RASQSVSTSAYSYMH

SEQ ID NO: 257 - protein, 7 aa, Artificial Sequence
  MADE IN LAB - P24532158 LIGHT CDR2
LASNLES

SEQ ID NO: 258 - protein, 9 aa, Artificial Sequence
  MADE IN LAB - P24532158 LIGHT CDR3
QQSRELPYT

SEQ ID NO: 259 - protein, 5 aa, Artificial Sequence
  MADE IN LAB - P24542158 HEAVY CDR1
ENIIA

SEQ ID NO: 260 - protein, 17 aa, Artificial Sequence
  MADE IN LAB - P24542158 HEAVY CDR2
WIHPGSGSIKYAQKLQG

SEQ ID NO: 261 - protein, 11 aa, Artificial Sequence
  MADE IN LAB - P24542158 HEAVY CDR3
HGGTGRGAMDY

SEQ ID NO: 262 - protein, 15 aa, Artificial Sequence
  MADE IN LAB - P24542158 LIGHT CDR1
RASQSVSTSAYSYMH

SEQ ID NO: 263 - protein, 7 aa, Artificial Sequence
  MADE IN LAB - P24542158 LIGHT CDR2
LASNLES

SEQ ID NO: 264 - protein, 9 aa, Artificial Sequence
  MADE IN LAB - P24542158 LIGHT CDR3
QQSRELPYT

SEQ ID NO: 265 - protein, 5 aa, Artificial Sequence
  MADE IN LAB - P24552158 HEAVY CDR1
ENIIH

SEQ ID NO: 266 - protein, 17 aa, Artificial Sequence
  MADE IN LAB - P24552158 HEAVY CDR2
WIAPGSGSIKYAQKLQG

SEQ ID NO: 267 - protein, 11 aa, Artificial Sequence
  MADE IN LAB - P24552158 HEAVY CDR3
HGGTGRGAMDY

SEQ ID NO: 268 - protein, 15 aa, Artificial Sequence
  MADE IN LAB - P24552158 LIGHT CDR1
RASQSVSTSAYSYMH

SEQ ID NO: 269 - protein, 7 aa, Artificial Sequence
  MADE IN LAB - P24552158 LIGHT CDR2
LASNLES

SEQ ID NO: 270 - protein, 9 aa, Artificial Sequence
  MADE IN LAB - P24552158 LIGHT CDR3
QQSRELPYT

SEQ ID NO: 271 - protein, 5 aa, Artificial Sequence
  MADE IN LAB - P24562158 HEAVY CDR1
ENIIH

SEQ ID NO: 272 - protein, 17 aa, Artificial Sequence
  MADE IN LAB - P24562158 HEAVY CDR2
WIHAGSGSIKYAQKLQG

SEQ ID NO: 273 - protein, 11 aa, Artificial Sequence
  MADE IN LAB - P24562158 HEAVY CDR3
HGGTGRGAMDY

SEQ ID NO: 274 - protein, 15 aa, Artificial Sequence
  MADE IN LAB - P24562158 LIGHT CDR1
RASQSVSTSAYSYMH

SEQ ID NO: 275 - protein, 7 aa, Artificial Sequence
  MADE IN LAB - P24562158 LIGHT CDR2
LASNLES

SEQ ID NO: 276 - protein, 9 aa, Artificial Sequence
  MADE IN LAB - P24562158 LIGHT CDR3
QQSRELPYT

SEQ ID NO: 277 - protein, 5 aa, Artificial Sequence
  MADE IN LAB - P24572158 HEAVY CDR1
ENIIH

SEQ ID NO: 278 - protein, 17 aa, Artificial Sequence
  MADE IN LAB - P24572158 HEAVY CDR2
WIHPASGSIKYAQKLQG

SEQ ID NO: 279 - protein, 11 aa, Artificial Sequence
  MADE IN LAB - P24572158 HEAVY CDR3
HGGTGRGAMDY

SEQ ID NO: 280 - protein, 15 aa, Artificial Sequence
  MADE IN LAB - P24572158 LIGHT CDR1
RASQSVSTSAYSYMH

SEQ ID NO: 281 - protein, 7 aa, Artificial Sequence
  MADE IN LAB - P24572158 LIGHT CDR2
LASNLES

SEQ ID NO: 282 - protein, 9 aa, Artificial Sequence
  MADE IN LAB - P24572158 LIGHT CDR3
QQSRELPYT

SEQ ID NO: 283 - protein, 5 aa, Artificial Sequence
  MADE IN LAB - P24582158 HEAVY CDR1
ENIIH

SEQ ID NO: 284 - protein, 17 aa, Artificial Sequence
  MADE IN LAB - P24582158 HEAVY CDR2
WIHPGAGSIKYAQKLQG

SEQ ID NO: 285 - protein, 11 aa, Artificial Sequence
  MADE IN LAB - P24582158 HEAVY CDR3
HGGTGRGAMDY

SEQ ID NO: 286 - protein, 15 aa, Artificial Sequence
  MADE IN LAB - P24582158 LIGHT CDR1
RASQSVSTSAYSYMH

SEQ ID NO: 287 - protein, 7 aa, Artificial Sequence
  MADE IN LAB - P24582158 LIGHT CDR2
LASNLES

SEQ ID NO: 288 - protein, 9 aa, Artificial Sequence
  MADE IN LAB - P24582158 LIGHT CDR3
QQSRELPYT

SEQ ID NO: 289 - protein, 5 aa, Artificial Sequence
  MADE IN LAB - P24592158 HEAVY CDR1
ENIIH

SEQ ID NO: 290 - protein, 17 aa, Artificial Sequence
  MADE IN LAB - P24592158 HEAVY CDR2
WIHPGSASIKYAQKLQG

SEQ ID NO: 291 - protein, 11 aa, Artificial Sequence
  MADE IN LAB - P24592158 HEAVY CDR3
HGGTGRGAMDY

SEQ ID NO: 292 - protein, 15 aa, Artificial Sequence
  MADE IN LAB - P24592158 LIGHT CDR1
RASQSVSTSAYSYMH

SEQ ID NO: 293 - protein, 7 aa, Artificial Sequence
  MADE IN LAB - P24592158 LIGHT CDR2
LASNLES

SEQ ID NO: 294 - protein, 9 aa, Artificial Sequence
  MADE IN LAB - P24592158 LIGHT CDR3
QQSRELPYT

SEQ ID NO: 295 - protein, 5 aa, Artificial Sequence
  MADE IN LAB - P24602158 HEAVY CDR1
ENIIH

SEQ ID NO: 296 - protein, 17 aa, Artificial Sequence
  MADE IN LAB - P24602158 HEAVY CDR2
WIHPGSGAIKYAQKLQG

SEQ ID NO: 297 - protein, 11 aa, Artificial Sequence
  MADE IN LAB - P24602158 HEAVY CDR3
HGGTGRGAMDY

SEQ ID NO: 298 - protein, 15 aa, Artificial Sequence
  MADE IN LAB - P24602158 LIGHT CDR1
RASQSVSTSAYSYMH

SEQ ID NO: 299 - protein, 7 aa, Artificial Sequence
  MADE IN LAB - P24602158 LIGHT CDR2
LASNLES

SEQ ID NO: 300 - protein, 9 aa, Artificial Sequence
  MADE IN LAB - P24602158 LIGHT CDR3
QQSRELPYT

SEQ ID NO: 301 - protein, 5 aa, Artificial Sequence
  MADE IN LAB - P24602537 HEAVY CDR1
ENIIH

SEQ ID NO: 302 - protein, 17 aa, Artificial Sequence
  MADE IN LAB - P24602537 HEAVY CDR2
WIHPGSGAIKYAQKLQG

SEQ ID NO: 303 - protein, 11 aa, Artificial Sequence
  MADE IN LAB - P24602537 HEAVY CDR3
HGGTGRGAMDY

SEQ ID NO: 304 - protein, 15 aa, Artificial Sequence
  MADE IN LAB - P24602537 LIGHT CDR1
RASQSVSTSAYSYMH

SEQ ID NO: 305 - protein, 7 aa, Artificial Sequence
  MADE IN LAB - P24602537 LIGHT CDR2
AASNLES

SEQ ID NO: 306 - protein, 9 aa, Artificial Sequence
  MADE IN LAB - P24602537 LIGHT CDR3
QQSREAPYT

SEQ ID NO: 307 - protein, 5 aa, Artificial Sequence
  MADE IN LAB - P24602538 HEAVY CDR1
ENIIH

SEQ ID NO: 308 - protein, 17 aa, Artificial Sequence
  MADE IN LAB - P24602538 HEAVY CDR2
WIHPGSGAIKYAQKLQG

SEQ ID NO: 309 - protein, 11 aa, Artificial Sequence
  MADE IN LAB - P24602538 HEAVY CDR3
HGGTGRGAMDY

SEQ ID NO: 310 - protein, 15 aa, Artificial Sequence
  MADE IN LAB - P24602538 LIGHT CDR1
RASQSVSTSAYSYMH

SEQ ID NO: 311 - protein, 7 aa, Artificial Sequence
  MADE IN LAB - P24602538 LIGHT CDR2
GASNLES

SEQ ID NO: 312 - protein, 9 aa, Artificial Sequence
  MADE IN LAB - P24602538 LIGHT CDR3
QQSREAPYT

SEQ ID NO: 313 - protein, 5 aa, Artificial Sequence
  MADE IN LAB - P24602539 HEAVY CDR1
ENIIH

SEQ ID NO: 314 - protein, 17 aa, Artificial Sequence
  MADE IN LAB - P24602539 HEAVY CDR2
WIHPGSGAIKYAQKLQG

SEQ ID NO: 315 - protein, 11 aa, Artificial Sequence
  MADE IN LAB - P24602539 HEAVY CDR3
HGGTGRGAMDY

SEQ ID NO: 316 - protein, 15 aa, Artificial Sequence
  MADE IN LAB - P24602539 LIGHT CDR1
RASQSVSTSAYSYMH

SEQ ID NO: 317 - protein, 7 aa, Artificial Sequence
  MADE IN LAB - P24602539 LIGHT CDR2
GASNLES

SEQ ID NO: 318 - protein, 9 aa, Artificial Sequence
  MADE IN LAB - P24602539 LIGHT CDR3
QQSREYPYT

SEQ ID NO: 319 - protein, 5 aa, Artificial Sequence
  MADE IN LAB - P24612158 HEAVY CDR1
ENIIH

SEQ ID NO: 320 - protein, 17 aa, Artificial Sequence
  MADE IN LAB - P24612158 HEAVY CDR2
WIHPGSASIKYAQKLQG

SEQ ID NO: 321 - protein, 11 aa, Artificial Sequence
  MADE IN LAB - P24612158 HEAVY CDR3
HGGTGRGAMDY

SEQ ID NO: 322 - protein, 15 aa, Artificial Sequence
  MADE IN LAB - P24612158 LIGHT CDR1
RASQSVSTSAYSYMH

SEQ ID NO: 323 - protein, 7 aa, Artificial Sequence
  MADE IN LAB - P24612158 LIGHT CDR2
LASNLES

SEQ ID NO: 324 - protein, 9 aa, Artificial Sequence
  MADE IN LAB - P24612158 LIGHT CDR3
QQSRELPYT

SEQ ID NO: 325 - protein, 5 aa, Artificial Sequence
  MADE IN LAB - P24622158 HEAVY CDR1
ENIIH

SEQ ID NO: 326 - protein, 17 aa, Artificial Sequence
  MADE IN LAB - P24622158 HEAVY CDR2
WIHPGSGSIAYAQKLQG

SEQ ID NO: 327 - protein, 11 aa, Artificial Sequence
  MADE IN LAB - P24622158 HEAVY CDR3
HGGTGRGAMDY

SEQ ID NO: 328 - protein, 15 aa, Artificial Sequence
  MADE IN LAB - P24622158 LIGHT CDR1
RASQSVSTSAYSYMH

SEQ ID NO: 329 - protein, 7 aa, Artificial Sequence
  MADE IN LAB - P24622158 LIGHT CDR2
LASNLES

SEQ ID NO: 330 - protein, 9 aa, Artificial Sequence
  MADE IN LAB - P24622158 LIGHT CDR3
QQSRELPYT

SEQ ID NO: 331 - protein, 5 aa, Artificial Sequence
  MADE IN LAB - P24632158 HEAVY CDR1
ENIIH

SEQ ID NO: 332 - protein, 17 aa, Artificial Sequence
  MADE IN LAB - P24632158 HEAVY CDR2
WIHPGSGSIKYAQKLQG

SEQ ID NO: 333 - protein, 11 aa, Artificial Sequence
  MADE IN LAB - P24632158 HEAVY CDR3
AGGTGRGAMDY

SEQ ID NO: 334 - protein, 15 aa, Artificial Sequence
  MADE IN LAB - P24632158 LIGHT CDR1
RASQSVSTSAYSYMH

SEQ ID NO: 335 - protein, 7 aa, Artificial Sequence
  MADE IN LAB - P24632158 LIGHT CDR2
LASNLES

SEQ ID NO: 336 - protein, 9 aa, Artificial Sequence
  MADE IN LAB - P24632158 LIGHT CDR3
QQSRELPYT

SEQ ID NO: 337 - protein, 5 aa, Artificial Sequence
  MADE IN LAB - P24642158 HEAVY CDR1
ENIIH

SEQ ID NO: 338 - protein, 17 aa, Artificial Sequence
  MADE IN LAB - P24642158 HEAVY CDR2
WIHPGSGSIKYAQKLQG

SEQ ID NO: 339 - protein, 11 aa, Artificial Sequence
  MADE IN LAB - P24642158 HEAVY CDR3
HAGTGRGAMDY

SEQ ID NO: 340 - protein, 15 aa, Artificial Sequence
  MADE IN LAB - P24642158 LIGHT CDR1
RASQSVSTSAYSYMH

SEQ ID NO: 341 - protein, 7 aa, Artificial Sequence
  MADE IN LAB - P24642158 LIGHT CDR2
LASNLES

SEQ ID NO: 342 - protein, 9 aa, Artificial Sequence
  MADE IN LAB - P24642158 LIGHT CDR3
QQSRELPYT

SEQ ID NO: 343 - protein, 5 aa, Artificial Sequence
  MADE IN LAB - P24652158 HEAVY CDR1
ENIIH

SEQ ID NO: 344 - protein, 17 aa, Artificial Sequence
  MADE IN LAB - P24652158 HEAVY CDR2
WIHPGSGSIKYAQKLQG

SEQ ID NO: 345 - protein, 11 aa, Artificial Sequence
  MADE IN LAB - P24652158 HEAVY CDR3
HGATGRGAMDY

SEQ ID NO: 346 - protein, 15 aa, Artificial Sequence
  MADE IN LAB - P24652158 LIGHT CDR1
RASQSVSTSAYSYMH

SEQ ID NO: 347 - protein, 7 aa, Artificial Sequence
  MADE IN LAB - P24652158 LIGHT CDR2
LASNLES

SEQ ID NO: 348 - protein, 9 aa, Artificial Sequence
  MADE IN LAB - P24652158 LIGHT CDR3
QQSRELPYT

SEQ ID NO: 349 - protein, 5 aa, Artificial Sequence
  MADE IN LAB - P24662158 HEAVY CDR1
ENIIH

SEQ ID NO: 350 - protein, 17 aa, Artificial Sequence
  MADE IN LAB - P24662158 HEAVY CDR2
WIHPGSGSIKYAQKLQG

SEQ ID NO: 351 - protein, 11 aa, Artificial Sequence
  MADE IN LAB - P24662158 HEAVY CDR3
HGGAGRGAMDY

SEQ ID NO: 352 - protein, 15 aa, Artificial Sequence
  MADE IN LAB - P24662158 LIGHT CDR1
RASQSVSTSAYSYMH

SEQ ID NO: 353 - protein, 7 aa, Artificial Sequence
  MADE IN LAB - P24662158 LIGHT CDR2
LASNLES

SEQ ID NO: 354 - protein, 9 aa, Artificial Sequence
  MADE IN LAB - P24662158 LIGHT CDR3
QQSRELPYT

SEQ ID NO: 355 - protein, 5 aa, Artificial Sequence
  MADE IN LAB - P24672158 HEAVY CDR1
ENIIH

SEQ ID NO: 356 - protein, 17 aa, Artificial Sequence
  MADE IN LAB - P24672158 HEAVY CDR2
WIHPGSGSIKYAQKLQG

SEQ ID NO: 357 - protein, 11 aa, Artificial Sequence
  MADE IN LAB - P24672158 HEAVY CDR3
HGGTARGAMDY

SEQ ID NO: 358 - protein, 15 aa, Artificial Sequence
  MADE IN LAB - P24672158 LIGHT CDR1
RASQSVSTSAYSYMH

SEQ ID NO: 359 - protein, 7 aa, Artificial Sequence
  MADE IN LAB - P24672158 LIGHT CDR2
LASNLES

SEQ ID NO: 360 - protein, 9 aa, Artificial Sequence
  MADE IN LAB - P24672158 LIGHT CDR3
QQSRELPYT

SEQ ID NO: 361 - protein, 5 aa, Artificial Sequence
  MADE IN LAB - P24682158 HEAVY CDR1
ENIIH

SEQ ID NO: 362 - protein, 17 aa, Artificial Sequence
  MADE IN LAB - P24682158 HEAVY CDR2
WIHPGSGSIKYAQKLQG

SEQ ID NO: 363 - protein, 11 aa, Artificial Sequence
  MADE IN LAB - P24682158 HEAVY CDR3
HGGTGAGAMDY

SEQ ID NO: 364 - protein, 15 aa, Artificial Sequence
  MADE IN LAB - P24682158 LIGHT CDR1
RASQSVSTSAYSYMH

SEQ ID NO: 365 - protein, 7 aa, Artificial Sequence
  MADE IN LAB - P24682158 LIGHT CDR2
LASNLES

SEQ ID NO: 366 - protein, 9 aa, Artificial Sequence
  MADE IN LAB - P24682158 LIGHT CDR3
QQSRELPYT

SEQ ID NO: 367 - protein, 5 aa, Artificial Sequence
  MADE IN LAB - P24692158 HEAVY CDR1
ENIIH

SEQ ID NO: 368 - protein, 17 aa, Artificial Sequence
  MADE IN LAB - P24692158 HEAVY CDR2
WIHPGSGSIKYAQKLQG

SEQ ID NO: 369 - protein, 11 aa, Artificial Sequence
  MADE IN LAB - P24692158 HEAVY CDR3
HGGTGRAAMDY

SEQ ID NO: 370 - protein, 15 aa, Artificial Sequence
  MADE IN LAB - P24692158 LIGHT CDR1
RASQSVSTSAYSYMH

SEQ ID NO: 371 - protein, 7 aa, Artificial Sequence
  MADE IN LAB - P24692158 LIGHT CDR2
LASNLES

SEQ ID NO: 372 - protein, 9 aa, Artificial Sequence
  MADE IN LAB - P24692158 LIGHT CDR3
QQSRELPYT

SEQ ID NO: 373 - protein, 5 aa, Artificial Sequence
  MADE IN LAB - P25352158 HEAVY CDR1
ANIIH

SEQ ID NO: 374 - protein, 17 aa, Artificial Sequence
  MADE IN LAB - P25352158 HEAVY CDR2
WIHPGSGAIKYAQKLQG

SEQ ID NO: 375 - protein, 11 aa, Artificial Sequence
  MADE IN LAB - P25352158 HEAVY CDR3
HGGTGRGAMDY

SEQ ID NO: 376 - protein, 15 aa, Artificial Sequence
  MADE IN LAB - P25352158 LIGHT CDR1
RASQSVSTSAYSYMH

SEQ ID NO: 377 - protein, 7 aa, Artificial Sequence
  MADE IN LAB - P25352158 LIGHT CDR2
LASNLES

SEQ ID NO: 378 - protein, 9 aa, Artificial Sequence
  MADE IN LAB - P25352158 LIGHT CDR3
QQSRELPYT

SEQ ID NO: 379 - protein, 5 aa, Artificial Sequence
  MADE IN LAB - P25352476 HEAVY CDR1
ANIIH

SEQ ID NO: 380 - protein, 17 aa, Artificial Sequence
  MADE IN LAB - P25352476 HEAVY CDR2
WIHPGSGAIKYAQKLQG

SEQ ID NO: 381 - protein, 11 aa, Artificial Sequence
  MADE IN LAB - P25352476 HEAVY CDR3
HGGTGRGAMDY

SEQ ID NO: 382 - protein, 15 aa, Artificial Sequence
  MADE IN LAB - P25352476 LIGHT CDR1
RASQSVSTSAYSYMH

SEQ ID NO: 383 - protein, 7 aa, Artificial Sequence
  MADE IN LAB - P25352476 LIGHT CDR2
AASNLES

SEQ ID NO: 384 - protein, 9 aa, Artificial Sequence
  MADE IN LAB - P25352476 LIGHT CDR3
QQSRELPYT

SEQ ID NO: 385 - protein, 5 aa, Artificial Sequence
  MADE IN LAB - P25352485 HEAVY CDR1
ANIIH

SEQ ID NO: 386 - protein, 17 aa, Artificial Sequence
  MADE IN LAB - P25352485 HEAVY CDR2
WIHPGSGAIKYAQKLQG

SEQ ID NO: 387 - protein, 11 aa, Artificial Sequence
  MADE IN LAB - P25352485 HEAVY CDR3
HGGTGRGAMDY

SEQ ID NO: 388 - protein, 15 aa, Artificial Sequence
  MADE IN LAB - P25352485 LIGHT CDR1
RASQSVSTSAYSYMH

SEQ ID NO: 389 - protein, 7 aa, Artificial Sequence
  MADE IN LAB - P25352485 LIGHT CDR2
LASNLES

SEQ ID NO: 390 - protein, 9 aa, Artificial Sequence
  MADE IN LAB - P25352485 LIGHT CDR3
QQSREAPYT

SEQ ID NO: 391 - protein, 5 aa, Artificial Sequence
  MADE IN LAB - P25352537 HEAVY CDR1
ANIIH

SEQ ID NO: 392 - protein, 17 aa, Artificial Sequence
  MADE IN LAB - P25352537 HEAVY CDR2
WIHPGSGAIKYAQKLQG

SEQ ID NO: 393 - protein, 11 aa, Artificial Sequence
  MADE IN LAB - P25352537 HEAVY CDR3
HGGTGRGAMDY

SEQ ID NO: 394 - protein, 15 aa, Artificial Sequence
  MADE IN LAB - P25352537 LIGHT CDR1
RASQSVSTSAYSYMH

SEQ ID NO: 395 - protein, 7 aa, Artificial Sequence
  MADE IN LAB - P25352537 LIGHT CDR2
AASNLES

SEQ ID NO: 396 - protein, 9 aa, Artificial Sequence
  MADE IN LAB - P25352537 LIGHT CDR3
QQSREAPYT

SEQ ID NO: 397 - protein, 5 aa, Artificial Sequence
  MADE IN LAB - P25352538 HEAVY CDR1
ANIIH

SEQ ID NO: 398 - protein, 17 aa, Artificial Sequence
  MADE IN LAB - P25352538 HEAVY CDR2
WIHPGSGAIKYAQKLQG

SEQ ID NO: 399 - protein, 11 aa, Artificial Sequence
  MADE IN LAB - P25352538 HEAVY CDR3
HGGTGRGAMDY

SEQ ID NO: 400 - protein, 15 aa, Artificial Sequence
  MADE IN LAB - P25352538 LIGHT CDR1
RASQSVSTSAYSYMH

SEQ ID NO: 401 - protein, 7 aa, Artificial Sequence
  MADE IN LAB - P25352538 LIGHT CDR2
GASNLES

SEQ ID NO: 402 - protein, 9 aa, Artificial Sequence
  MADE IN LAB - P25352538 LIGHT CDR3
QQSREAPYT

SEQ ID NO: 403 - protein, 5 aa, Artificial Sequence
  MADE IN LAB - P25352539 HEAVY CDR1
ANIIH

SEQ ID NO: 404 - protein, 17 aa, Artificial Sequence
  MADE IN LAB - P25352539 HEAVY CDR2
WIHPGSGAIKYAQKLQG

SEQ ID NO: 405 - protein, 11 aa, Artificial Sequence
  MADE IN LAB - P25352539 HEAVY CDR3
HGGTGRGAMDY

SEQ ID NO: 406 - protein, 15 aa, Artificial Sequence
  MADE IN LAB - P25352539 LIGHT CDR1
RASQSVSTSAYSYMH

SEQ ID NO: 407 - protein, 7 aa, Artificial Sequence
  MADE IN LAB - P25352539 LIGHT CDR2
GASNLES

SEQ ID NO: 408 - protein, 9 aa, Artificial Sequence
  MADE IN LAB - P25352539 LIGHT CDR3
QQSREYPYT

SEQ ID NO: 409 - protein, 5 aa, Artificial Sequence
  MADE IN LAB - P25362158 HEAVY CDR1
SNIIH

SEQ ID NO: 410 - protein, 17 aa, Artificial Sequence
  MADE IN LAB - P25362158 HEAVY CDR2
WIHPGSGAIKYAQKLQG

SEQ ID NO: 411 - protein, 11 aa, Artificial Sequence
  MADE IN LAB - P25362158 HEAVY CDR3
HGGTGRGAMDY

SEQ ID NO: 412 - protein, 15 aa, Artificial Sequence
  MADE IN LAB - P25362158 LIGHT CDR1
RASQSVSTSAYSYMH

SEQ ID NO: 413 - protein, 7 aa, Artificial Sequence
  MADE IN LAB - P25362158 LIGHT CDR2
LASNLES

SEQ ID NO: 414 - protein, 9 aa, Artificial Sequence
  MADE IN LAB - P25362158 LIGHT CDR3
QQSRELPYT

SEQ ID NO: 415 - protein, 5 aa, Artificial Sequence
  MADE IN LAB - P25362476 HEAVY CDR1
SNIIH

SEQ ID NO: 416 - protein, 17 aa, Artificial Sequence
  MADE IN LAB - P25362476 HEAVY CDR2
WIHPGSGAIKYAQKLQG

SEQ ID NO: 417 - protein, 11 aa, Artificial Sequence
  MADE IN LAB - P25362476 HEAVY CDR3
HGGTGRGAMDY

SEQ ID NO: 418 - protein, 15 aa, Artificial Sequence
  MADE IN LAB - P25362476 LIGHT CDR1
RASQSVSTSAYSYMH

SEQ ID NO: 419 - protein, 7 aa, Artificial Sequence
  MADE IN LAB - P25362476 LIGHT CDR2
AASNLES

SEQ ID NO: 420 - protein, 9 aa, Artificial Sequence
  MADE IN LAB - P25362476 LIGHT CDR3
QQSRELPYT

SEQ ID NO: 421 - protein, 5 aa, Artificial Sequence
  MADE IN LAB - P25362485 HEAVY CDR1
SNIIH

SEQ ID NO: 422 - protein, 17 aa, Artificial Sequence
  MADE IN LAB - P25362485 HEAVY CDR2
WIHPGSGAIKYAQKLQG

SEQ ID NO: 423 - protein, 11 aa, Artificial Sequence
  MADE IN LAB - P25362485 HEAVY CDR3
HGGTGRGAMDY

SEQ ID NO: 424 - protein, 15 aa, Artificial Sequence
  MADE IN LAB - P25362485 LIGHT CDR1
RASQSVSTSAYSYMH

SEQ ID NO: 425 - protein, 7 aa, Artificial Sequence
  MADE IN LAB - P25362485 LIGHT CDR2
LASNLES

SEQ ID NO: 426 - protein, 8 aa, Artificial Sequence
  MADE IN LAB - P25362485 LIGHT CDR3
QQSREAPY

SEQ ID NO: 427 - protein, 5 aa, Artificial Sequence
  MADE IN LAB - P25362537 HEAVY CDR1
SNIIH

SEQ ID NO: 428 - protein, 17 aa, Artificial Sequence
  MADE IN LAB - P25362537 HEAVY CDR2
WIHPGSGAIKYAQKLQG

SEQ ID NO: 429 - protein, 11 aa, Artificial Sequence
  MADE IN LAB - P25362537 HEAVY CDR3
HGGTGRGAMDY

SEQ ID NO: 430 - protein, 15 aa, Artificial Sequence
  MADE IN LAB - P25362537 LIGHT CDR1
RASQSVSTSAYSYMH

SEQ ID NO: 431 - protein, 7 aa, Artificial Sequence
  MADE IN LAB - P25362537 LIGHT CDR2
AASNLES

SEQ ID NO: 432 - protein, 9 aa, Artificial Sequence
  MADE IN LAB - P25362537 LIGHT CDR3
QQSREAPYT

SEQ ID NO: 433 - protein, 5 aa, Artificial Sequence
  MADE IN LAB - P25362538 HEAVY CDR1
SNIIH

SEQ ID NO: 434 - protein, 17 aa, Artificial Sequence
  MADE IN LAB - P25362538 HEAVY CDR2
WIHPGSGAIKYAQKLQG

SEQ ID NO: 435 - protein, 11 aa, Artificial Sequence
  MADE IN LAB - P25362538 HEAVY CDR3
HGGTGRGAMDY

SEQ ID NO: 436 - protein, 15 aa, Artificial Sequence
  MADE IN LAB - P25362538 LIGHT CDR1
RASQSVSTSAYSYMH

SEQ ID NO: 437 - protein, 7 aa, Artificial Sequence
  MADE IN LAB - P25362538 LIGHT CDR2
GASNLES

SEQ ID NO: 438 - protein, 9 aa, Artificial Sequence
  MADE IN LAB - P25362538 LIGHT CDR3
QQSREAPYT

SEQ ID NO: 439 - protein, 5 aa, Artificial Sequence
  MADE IN LAB - P25362539 HEAVY CDR1
SNIIH

SEQ ID NO: 440 - protein, 17 aa, Artificial Sequence
  MADE IN LAB - P25362539 HEAVY CDR2
WIHPGSGAIKYAQKLQG

SEQ ID NO: 441 - protein, 11 aa, Artificial Sequence
  MADE IN LAB - P25362539 HEAVY CDR3
HGGTGRGAMDY

SEQ ID NO: 442 - protein, 15 aa, Artificial Sequence
  MADE IN LAB - P25362539 LIGHT CDR1
RASQSVSTSAYSYMH

SEQ ID NO: 443 - protein, 7 aa, Artificial Sequence
  MADE IN LAB - P25362539 LIGHT CDR2
GASNLES

SEQ ID NO: 444 - protein, 9 aa, Artificial Sequence
  MADE IN LAB - P25362539 LIGHT CDR3
QQSREYPYT

SEQ ID NO: 445 - protein, 5 aa, Artificial Sequence
  MADE IN LAB - P26292158 HEAVY CDR1
ANIIH

SEQ ID NO: 446 - protein, 17 aa, Artificial Sequence
  MADE IN LAB - P26292158 HEAVY CDR2
WIHPGSGSIKYAQKLQG

SEQ ID NO: 447 - protein, 11 aa, Artificial Sequence
  MADE IN LAB - P26292158 HEAVY CDR3
HGGTGRGAMDY

SEQ ID NO: 448 - protein, 15 aa, Artificial Sequence
  MADE IN LAB - P26292158 LIGHT CDR1
RASQSVSTSAYSYMH

SEQ ID NO: 449 - protein, 7 aa, Artificial Sequence
  MADE IN LAB - P26292158 LIGHT CDR2
LASNLES

SEQ ID NO: 450 - protein, 9 aa, Artificial Sequence
  MADE IN LAB - P26292158 LIGHT CDR3
QQSRELPYT

SEQ ID NO: 451 - protein, 5 aa, Artificial Sequence
  MADE IN LAB - P26292485 HEAVY CDR1
ANIIH

SEQ ID NO: 452 - protein, 17 aa, Artificial Sequence
  MADE IN LAB - P26292485 HEAVY CDR2
WIHPGSGSIKYAQKLQG

SEQ ID NO: 453 - protein, 11 aa, Artificial Sequence
  MADE IN LAB - P26292485 HEAVY CDR3
HGGTGRGAMDY

SEQ ID NO: 454 - protein, 15 aa, Artificial Sequence
  MADE IN LAB - P26292485 LIGHT CDR1
RASQSVSTSAYSYMH

SEQ ID NO: 455 - protein, 7 aa, Artificial Sequence
  MADE IN LAB - P26292485 LIGHT CDR2
LASNLES

SEQ ID NO: 456 - protein, 9 aa, Artificial Sequence
  MADE IN LAB - P26292485 LIGHT CDR3
QQSREAPYT

SEQ ID NO: 457 - protein, 5 aa, Artificial Sequence
  MADE IN LAB - P26302158 HEAVY CDR1
ENAIH

SEQ ID NO: 458 - protein, 17 aa, Artificial Sequence
  MADE IN LAB - P26302158 HEAVY CDR2
WIHPGSGSIKYAQKLQG

SEQ ID NO: 459 - protein, 11 aa, Artificial Sequence
  MADE IN LAB - P26302158 HEAVY CDR3
HGGTGRGAMDY

SEQ ID NO: 460 - protein, 15 aa, Artificial Sequence
  MADE IN LAB - P26302158 LIGHT CDR1
RASQSVSTSAYSYMH

SEQ ID NO: 461 - protein, 7 aa, Artificial Sequence
  MADE IN LAB - P26302158 LIGHT CDR2
LASNLES

SEQ ID NO: 462 - protein, 9 aa, Artificial Sequence
  MADE IN LAB - P26302158 LIGHT CDR3
QQSRELPYT

SEQ ID NO: 463 - protein, 5 aa, Artificial Sequence
  MADE IN LAB - P26312158 HEAVY CDR1
ENIIH

SEQ ID NO: 464 - protein, 17 aa, Artificial Sequence
  MADE IN LAB - P26312158 HEAVY CDR2
WIHPGSGAIKYAQKLQG

SEQ ID NO: 465 - protein, 11 aa, Artificial Sequence
  MADE IN LAB - P26312158 HEAVY CDR3
HGGTGRGAMDY

SEQ ID NO: 466 - protein, 15 aa, Artificial Sequence
  MADE IN LAB - P26312158 LIGHT CDR1
RASQSVSTSAYSYMH

SEQ ID NO: 467 - protein, 7 aa, Artificial Sequence
  MADE IN LAB - P26312158 LIGHT CDR2
LASNLES

SEQ ID NO: 468 - protein, 9 aa, Artificial Sequence
  MADE IN LAB - P26312158 LIGHT CDR3
QQSRELPYT

SEQ ID NO: 469 - protein, 5 aa, Artificial Sequence
  MADE IN LAB - P26312537 HEAVY CDR1
ENIIH

SEQ ID NO: 470 - protein, 17 aa, Artificial Sequence
  MADE IN LAB - P26312537 HEAVY CDR2
WIHPGSGAIKYAQKLQG

SEQ ID NO: 471 - protein, 11 aa, Artificial Sequence
  MADE IN LAB - P26312537 HEAVY CDR3
HGGTGRGAMDY

SEQ ID NO: 472 - protein, 15 aa, Artificial Sequence
  MADE IN LAB - P26312537 LIGHT CDR1
RASQSVSTSAYSYMH

SEQ ID NO: 473 - protein, 7 aa, Artificial Sequence
  MADE IN LAB - P26312537 LIGHT CDR2
AASNLES

SEQ ID NO: 474 - protein, 9 aa, Artificial Sequence
  MADE IN LAB - P26312537 LIGHT CDR3
QQSREAPYT

SEQ ID NO: 475 - protein, 5 aa, Artificial Sequence
  MADE IN LAB - P26312538 HEAVY CDR1
ENIIH

SEQ ID NO: 476 - protein, 17 aa, Artificial Sequence
  MADE IN LAB - P26312538 HEAVY CDR2
WIHPGSGAIKYAQKLQG

SEQ ID NO: 477 - protein, 11 aa, Artificial Sequence
  MADE IN LAB - P26312538 HEAVY CDR3
HGGTGRGAMDY

SEQ ID NO: 478 - protein, 15 aa, Artificial Sequence
  MADE IN LAB - P26312538 LIGHT CDR1
RASQSVSTSAYSYMH

SEQ ID NO: 479 - protein, 7 aa, Artificial Sequence
  MADE IN LAB - P26312538 LIGHT CDR2
GASNLES

SEQ ID NO: 480 - protein, 9 aa, Artificial Sequence
  MADE IN LAB - P26312538 LIGHT CDR3
QQSREAPYT

SEQ ID NO: 481 - protein, 5 aa, Artificial Sequence
  MADE IN LAB - P26322158 HEAVY CDR1
ENIIH

SEQ ID NO: 482 - protein, 17 aa, Artificial Sequence
  MADE IN LAB - P26322158 HEAVY CDR2
WIHPGSGSIKYAQKLQG

SEQ ID NO: 483 - protein, 11 aa, Artificial Sequence
  MADE IN LAB - P26322158 HEAVY CDR3
HGGTGRAAMDY

SEQ ID NO: 484 - protein, 15 aa, Artificial Sequence
  MADE IN LAB - P26322158 LIGHT CDR1
RASQSVSTSAYSYMH

SEQ ID NO: 485 - protein, 7 aa, Artificial Sequence
  MADE IN LAB - P26322158 LIGHT CDR2
LASNLES

SEQ ID NO: 486 - protein, 9 aa, Artificial Sequence
  MADE IN LAB - P26322158 LIGHT CDR3
QQSRELPYT

SEQ ID NO: 487 - protein, 5 aa, Artificial Sequence
  MADE IN LAB - P26332158 HEAVY CDR1
ENIIH

SEQ ID NO: 488 - protein, 17 aa, Artificial Sequence
  MADE IN LAB - P26332158 HEAVY CDR2
WIHPGSGSIKYAQKLQG

SEQ ID NO: 489 - protein, 11 aa, Artificial Sequence
  MADE IN LAB - P26332158 HEAVY CDR3
HGGTGRAAMDY

SEQ ID NO: 490 - protein, 15 aa, Artificial Sequence
  MADE IN LAB - P26332158 LIGHT CDR1
RASQSVSTSAYSYMH

SEQ ID NO: 491 - protein, 7 aa, Artificial Sequence
  MADE IN LAB - P26332158 LIGHT CDR2
LASNLES

SEQ ID NO: 492 - protein, 9 aa, Artificial Sequence
  MADE IN LAB - P26332158 LIGHT CDR3
QQSRELPYT

SEQ ID NO: 493 - protein, 5 aa, Artificial Sequence
  MADE IN LAB - P26342472 HEAVY CDR1
ENIIH

SEQ ID NO: 494 - protein, 17 aa, Artificial Sequence
  MADE IN LAB - P26342472 HEAVY CDR2
WIHPGSGSIKYAQKLQG

SEQ ID NO: 495 - protein, 11 aa, Artificial Sequence
  MADE IN LAB - P26342472 HEAVY CDR3
HGGTGRGAMDY

SEQ ID NO: 496 - protein, 15 aa, Artificial Sequence
  MADE IN LAB - P26342472 LIGHT CDR1
RASQSVSTSAASYMH

SEQ ID NO: 497 - protein, 6 aa, Artificial Sequence
  MADE IN LAB - P26342472 LIGHT CDR2
ASNLES

SEQ ID NO: 498 - protein, 9 aa, Artificial Sequence
  MADE IN LAB - P26342472 LIGHT CDR3
QQSRELPYT

SEQ ID NO: 499 - protein, 5 aa, Artificial Sequence
  MADE IN LAB - P26342476 HEAVY CDR1
ENIIH

SEQ ID NO: 500 - protein, 17 aa, Artificial Sequence
  MADE IN LAB - P26342476 HEAVY CDR2
WIHPGSGSIKYAQKLQG

SEQ ID NO: 501 - protein, 11 aa, Artificial Sequence
  MADE IN LAB - P26342476 HEAVY CDR3
HGGTGRGAMDY

SEQ ID NO: 502 - protein, 15 aa, Artificial Sequence
  MADE IN LAB - P26342476 LIGHT CDR1
RASQSVSTSAYSYMH

SEQ ID NO: 503 - protein, 7 aa, Artificial Sequence
  MADE IN LAB - P26342476 LIGHT CDR2
AASNLES

SEQ ID NO: 504 - protein, 9 aa, Artificial Sequence
  MADE IN LAB - P26342476 LIGHT CDR3
QQSRELPYT

SEQ ID NO: 505 - protein, 5 aa, Artificial Sequence
  MADE IN LAB - P26342482 HEAVY CDR1
ENIIH

SEQ ID NO: 506 - protein, 17 aa, Artificial Sequence
  MADE IN LAB - P26342482 HEAVY CDR2
WIHPGSGSIKYAQKLQG

SEQ ID NO: 507 - protein, 11 aa, Artificial Sequence
  MADE IN LAB - P26342482 HEAVY CDR3
HGGTGRGAMDY

SEQ ID NO: 508 - protein, 15 aa, Artificial Sequence
  MADE IN LAB - P26342482 LIGHT CDR1
RASQSVSTSAYSYMH

SEQ ID NO: 509 - protein, 7 aa, Artificial Sequence
  MADE IN LAB - P26342482 LIGHT CDR2
LASNLES

SEQ ID NO: 510 - protein, 9 aa, Artificial Sequence
  MADE IN LAB - P26342482 LIGHT CDR3
QQARELPYT

SEQ ID NO: 511 - protein, 5 aa, Artificial Sequence
  MADE IN LAB - P26342485 HEAVY CDR1
ENIIH

SEQ ID NO: 512 - protein, 17 aa, Artificial Sequence
  MADE IN LAB - P26342485 HEAVY CDR2
WIHPGSGSIKYAQKLQG

SEQ ID NO: 513 - protein, 11 aa, Artificial Sequence
  MADE IN LAB - P26342485 HEAVY CDR3
HGGTGRGAMDY

SEQ ID NO: 514 - protein, 15 aa, Artificial Sequence
  MADE IN LAB - P26342485 LIGHT CDR1
RASQSVSTSAYSYMH

SEQ ID NO: 515 - protein, 7 aa, Artificial Sequence
  MADE IN LAB - P26342485 LIGHT CDR2
LASNLES

SEQ ID NO: 516 - protein, 9 aa, Artificial Sequence
  MADE IN LAB - P26342485 LIGHT CDR3
QQSREAPYT

SEQ ID NO: 517 - protein, 5 aa, Artificial Sequence
  MADE IN LAB - P26352158 HEAVY CDR1
SNIIH

SEQ ID NO: 518 - protein, 17 aa, Artificial Sequence
  MADE IN LAB - P26352158 HEAVY CDR2
WIHPGSGAIKYAQKLQG

SEQ ID NO: 519 - protein, 11 aa, Artificial Sequence
  MADE IN LAB - P26352158 HEAVY CDR3
HGGTGRGAMDY

SEQ ID NO: 520 - protein, 15 aa, Artificial Sequence
  MADE IN LAB - P26352158 LIGHT CDR1
RASQSVSTSAYSYMH

SEQ ID NO: 521 - protein, 7 aa, Artificial Sequence
  MADE IN LAB - P26352158 LIGHT CDR2
LASNLES

SEQ ID NO: 522 - protein, 9 aa, Artificial Sequence
  MADE IN LAB - P26352158 LIGHT CDR3
QQSRELPYT

SEQ ID NO: 523 - protein, 5 aa, Artificial Sequence
  MADE IN LAB - P26352538 HEAVY CDR1
SNIIH

SEQ ID NO: 524 - protein, 17 aa, Artificial Sequence
  MADE IN LAB - P26352538 HEAVY CDR2
WIHPGSGAIKYAQKLQG

SEQ ID NO: 525 - protein, 11 aa, Artificial Sequence
  MADE IN LAB - P26352538 HEAVY CDR3
HGGTGRGAMDY

SEQ ID NO: 526 - protein, 15 aa, Artificial Sequence
  MADE IN LAB - P26352538 LIGHT CDR1
RASQSVSTSAYSYMH

SEQ ID NO: 527 - protein, 7 aa, Artificial Sequence
  MADE IN LAB - P26352538 LIGHT CDR2
GASNLES

SEQ ID NO: 528 - protein, 9 aa, Artificial Sequence
  MADE IN LAB - P26352538 LIGHT CDR3
QQSREAPYT

SEQ ID NO: 529 - protein, 5 aa, Artificial Sequence
  MADE IN LAB - P26362537 HEAVY CDR1
ANIIH

SEQ ID NO: 530 - protein, 17 aa, Artificial Sequence
  MADE IN LAB - P26362537 HEAVY CDR2
WIHPGSGAIKYAQKLQG

SEQ ID NO: 531 - protein, 11 aa, Artificial Sequence
  MADE IN LAB - P26362537 HEAVY CDR3
HGGTGRGAMDY

SEQ ID NO: 532 - protein, 15 aa, Artificial Sequence
  MADE IN LAB - P26362537 LIGHT CDR1
RASQSVSTSAYSYMH

SEQ ID NO: 533 - protein, 7 aa, Artificial Sequence
  MADE IN LAB - P26362537 LIGHT CDR2
AASNLES

SEQ ID NO: 534 - protein, 9 aa, Artificial Sequence
  MADE IN LAB - P26362537 LIGHT CDR3
QQSREAPYT

SEQ ID NO: 535 - protein, 5 aa, Artificial Sequence
  MADE IN LAB - P26372538 HEAVY CDR1
SNIIH

SEQ ID NO: 536 - protein, 17 aa, Artificial Sequence
  MADE IN LAB - P26372538 HEAVY CDR2
WIHPGSGAIKYAQKLQG

SEQ ID NO: 537 - protein, 11 aa, Artificial Sequence
  MADE IN LAB - P26372538 HEAVY CDR3
HGGTGRGAMDY

SEQ ID NO: 538 - protein, 15 aa, Artificial Sequence
  MADE IN LAB - P26372538 LIGHT CDR1
RASQSVSTSAYSYMH

SEQ ID NO: 539 - protein, 7 aa, Artificial Sequence
  MADE IN LAB - P26372538 LIGHT CDR2
GASNLES

SEQ ID NO: 540 - protein, 9 aa, Artificial Sequence
  MADE IN LAB - P26372538 LIGHT CDR3
QQSREAPYT

SEQ ID NO: 541 - protein, 5 aa, Artificial Sequence
  MADE IN LAB - P28742158 HEAVY CDR1
SNIIH

SEQ ID NO: 542 - protein, 17 aa, Artificial Sequence
  MADE IN LAB - P28742158 HEAVY CDR2
WFHPGSGAIKYAQKLQG

SEQ ID NO: 543 - protein, 11 aa, Artificial Sequence
  MADE IN LAB - P28742158 HEAVY CDR3
HGGTGRGAMDY

SEQ ID NO: 544 - protein, 15 aa, Artificial Sequence
  MADE IN LAB - P28742158 LIGHT CDR1
RASQSVSTSAYSYMH

SEQ ID NO: 545 - protein, 7 aa, Artificial Sequence
  MADE IN LAB - P28742158 LIGHT CDR2
LASNLES

SEQ ID NO: 546 - protein, 9 aa, Artificial Sequence
  MADE IN LAB - P28742158 LIGHT CDR3
QQSRELPYT

SEQ ID NO: 547 - protein, 5 aa, Artificial Sequence
  MADE IN LAB - P28752158 HEAVY CDR1
DNIIH

SEQ ID NO: 548 - protein, 17 aa, Artificial Sequence
  MADE IN LAB - P28752158 HEAVY CDR2
WIHPGSGAIKYAQKLQG

SEQ ID NO: 549 - protein, 11 aa, Artificial Sequence
  MADE IN LAB - P28752158 HEAVY CDR3
HGGTGRGAMDY

SEQ ID NO: 550 - protein, 15 aa, Artificial Sequence
  MADE IN LAB - P28752158 LIGHT CDR1
RASQSVSTSAYSYMH

SEQ ID NO: 551 - protein, 7 aa, Artificial Sequence
  MADE IN LAB - P28752158 LIGHT CDR2
LASNLES

SEQ ID NO: 552 - protein, 9 aa, Artificial Sequence
  MADE IN LAB - P28752158 LIGHT CDR3
QQSRELPYT

SEQ ID NO: 553 - protein, 5 aa, Artificial Sequence
  MADE IN LAB - P28762158 HEAVY CDR1
ENIIH

SEQ ID NO: 554 - protein, 17 aa, Artificial Sequence
  MADE IN LAB - P28762158 HEAVY CDR2
WIHPGSGAIKYAQKLQG

SEQ ID NO: 555 - protein, 11 aa, Artificial Sequence
  MADE IN LAB - P28762158 HEAVY CDR3
HGGTGRGAMDY

SEQ ID NO: 556 - protein, 15 aa, Artificial Sequence
  MADE IN LAB - P28762158 LIGHT CDR1
RASQSVSTSAYSYMH

SEQ ID NO: 557 - protein, 7 aa, Artificial Sequence
  MADE IN LAB - P28762158 LIGHT CDR2
LASNLES

SEQ ID NO: 558 - protein, 9 aa, Artificial Sequence
  MADE IN LAB - P28762158 LIGHT CDR3
QQSRELPYT

SEQ ID NO: 559 - protein, 5 aa, Artificial Sequence
  MADE IN LAB - P28772158 HEAVY CDR1
FNIIH

SEQ ID NO: 560 - protein, 17 aa, Artificial Sequence
  MADE IN LAB - P28772158 HEAVY CDR2
WIHPGSGAIKYAQKLQG

SEQ ID NO: 561 - protein, 11 aa, Artificial Sequence
  MADE IN LAB - P28772158 HEAVY CDR3
HGGTGRGAMDY

SEQ ID NO: 562 - protein, 15 aa, Artificial Sequence
  MADE IN LAB - P28772158 LIGHT CDR1
RASQSVSTSAYSYMH

SEQ ID NO: 563 - protein, 7 aa, Artificial Sequence
  MADE IN LAB - P28772158 LIGHT CDR2
LASNLES

SEQ ID NO: 564 - protein, 9 aa, Artificial Sequence
  MADE IN LAB - P28772158 LIGHT CDR3
QQSRELPYT

SEQ ID NO: 565 - protein, 5 aa, Artificial Sequence
  MADE IN LAB - P28782158 HEAVY CDR1
GNIIH

SEQ ID NO: 566 - protein, 17 aa, Artificial Sequence
  MADE IN LAB - P28782158 HEAVY CDR2
WIHPGSGAIKYAQKLQG

SEQ ID NO: 567 - protein, 11 aa, Artificial Sequence
  MADE IN LAB - P28782158 HEAVY CDR3
HGGTGRGAMDY

SEQ ID NO: 568 - protein, 15 aa, Artificial Sequence
  MADE IN LAB - P28782158 LIGHT CDR1
RASQSVSTSAYSYMH

SEQ ID NO: 569 - protein, 7 aa, Artificial Sequence
  MADE IN LAB - P28782158 LIGHT CDR2
LASNLES

SEQ ID NO: 570 - protein, 9 aa, Artificial Sequence
  MADE IN LAB - P28782158 LIGHT CDR3
QQSRELPYT

SEQ ID NO: 571 - protein, 5 aa, Artificial Sequence
  MADE IN LAB - P28792158 HEAVY CDR1
HNIIH

SEQ ID NO: 572 - protein, 17 aa, Artificial Sequence
  MADE IN LAB - P28792158 HEAVY CDR2
WIHPGSGAIKYAQKLQG

SEQ ID NO: 573 - protein, 11 aa, Artificial Sequence
  MADE IN LAB - P28792158 HEAVY CDR3
HGGTGRGAMDY

SEQ ID NO: 574 - protein, 15 aa, Artificial Sequence
  MADE IN LAB - P28792158 LIGHT CDR1
RASQSVSTSAYSYMH

SEQ ID NO: 575 - protein, 7 aa, Artificial Sequence
  MADE IN LAB - P28792158 LIGHT CDR2
LASNLES

SEQ ID NO: 576 - protein, 9 aa, Artificial Sequence
  MADE IN LAB - P28792158 LIGHT CDR3
QQSRELPYT

SEQ ID NO: 577 - protein, 5 aa, Artificial Sequence
  MADE IN LAB - P28802158 HEAVY CDR1
INIIH

SEQ ID NO: 578 - protein, 17 aa, Artificial Sequence
  MADE IN LAB - P28802158 HEAVY CDR2
WIHPGSGAIKYAQKLQG

SEQ ID NO: 579 - protein, 11 aa, Artificial Sequence
  MADE IN LAB - P28802158 HEAVY CDR3
HGGTGRGAMDY

SEQ ID NO: 580 - protein, 15 aa, Artificial Sequence
  MADE IN LAB - P28802158 LIGHT CDR1
RASQSVSTSAYSYMH

SEQ ID NO: 581 - protein, 7 aa, Artificial Sequence
  MADE IN LAB - P28802158 LIGHT CDR2
LASNLES

SEQ ID NO: 582 - protein, 9 aa, Artificial Sequence
  MADE IN LAB - P28802158 LIGHT CDR3
QQSRELPYT

SEQ ID NO: 583 - protein, 5 aa, Artificial Sequence
  MADE IN LAB - P28812158 HEAVY CDR1
KNIIH

SEQ ID NO: 584 - protein, 17 aa, Artificial Sequence
  MADE IN LAB - P28812158 HEAVY CDR2
WIHPGSGAIKYAQKLQG

SEQ ID NO: 585 - protein, 11 aa, Artificial Sequence
  MADE IN LAB - P28812158 HEAVY CDR3
HGGTGRGAMDY

SEQ ID NO: 586 - protein, 15 aa, Artificial Sequence
  MADE IN LAB - P28812158 LIGHT CDR1
RASQSVSTSAYSYMH

SEQ ID NO: 587 - protein, 7 aa, Artificial Sequence
  MADE IN LAB - P28812158 LIGHT CDR2
LASNLES

SEQ ID NO: 588 - protein, 9 aa, Artificial Sequence
  MADE IN LAB - P28812158 LIGHT CDR3
QQSRELPYT

SEQ ID NO: 589 - protein, 5 aa, Artificial Sequence
  MADE IN LAB - P28822158 HEAVY CDR1
LNIIH

SEQ ID NO: 590 - protein, 17 aa, Artificial Sequence
  MADE IN LAB - P28822158 HEAVY CDR2
WIHPGSGAIKYAQKLQG

SEQ ID NO: 591 - protein, 11 aa, Artificial Sequence
  MADE IN LAB - P28822158 HEAVY CDR3
HGGTGRGAMDY

SEQ ID NO: 592 - protein, 15 aa, Artificial Sequence
  MADE IN LAB - P28822158 LIGHT CDR1
RASQSVSTSAYSYMH

SEQ ID NO: 593 - protein, 7 aa, Artificial Sequence
  MADE IN LAB - P28822158 LIGHT CDR2
LASNLES

SEQ ID NO: 594 - protein, 9 aa, Artificial Sequence
  MADE IN LAB - P28822158 LIGHT CDR3
QQSRELPYT

SEQ ID NO: 595 - protein, 5 aa, Artificial Sequence
  MADE IN LAB - P28832158 HEAVY CDR1
MNIIH

SEQ ID NO: 596 - protein, 17 aa, Artificial Sequence
  MADE IN LAB - P28832158 HEAVY CDR2
WIHPGSGAIKYAQKLQG

SEQ ID NO: 597 - protein, 11 aa, Artificial Sequence
  MADE IN LAB - P28832158 HEAVY CDR3
HGGTGRGAMDY

SEQ ID NO: 598 - protein, 15 aa, Artificial Sequence
  MADE IN LAB - P28832158 LIGHT CDR1
RASQSVSTSAYSYMH

SEQ ID NO: 599 - protein, 7 aa, Artificial Sequence
  MADE IN LAB - P28832158 LIGHT CDR2
LASNLES

SEQ ID NO: 600 - protein, 9 aa, Artificial Sequence
  MADE IN LAB - P28832158 LIGHT CDR3
QQSRELPYT

SEQ ID NO: 601 - protein, 5 aa, Artificial Sequence
  MADE IN LAB - P28842158 HEAVY CDR1
NNIIH

SEQ ID NO: 602 - protein, 17 aa, Artificial Sequence
  MADE IN LAB - P28842158 HEAVY CDR2
WIHPGSGAIKYAQKLQG

SEQ ID NO: 603 - protein, 11 aa, Artificial Sequence
  MADE IN LAB - P28842158 HEAVY CDR3
HGGTGRGAMDY

SEQ ID NO: 604 - protein, 15 aa, Artificial Sequence
  MADE IN LAB - P28842158 LIGHT CDR1
RASQSVSTSAYSYMH

SEQ ID NO: 605 - protein, 7 aa, Artificial Sequence
  MADE IN LAB - P28842158 LIGHT CDR2
LASNLES

SEQ ID NO: 606 - protein, 9 aa, Artificial Sequence
  MADE IN LAB - P28842158 LIGHT CDR3
QQSRELPYT

SEQ ID NO: 607 - protein, 5 aa, Artificial Sequence
  MADE IN LAB - P28852158 HEAVY CDR1
PNIIH

SEQ ID NO: 608 - protein, 17 aa, Artificial Sequence
  MADE IN LAB - P28852158 HEAVY CDR2
WIHPGSGAIKYAQKLQG

SEQ ID NO: 609 - protein, 11 aa, Artificial Sequence
  MADE IN LAB - P28852158 HEAVY CDR3
HGGTGRGAMDY

SEQ ID NO: 610 - protein, 15 aa, Artificial Sequence
  MADE IN LAB - P28852158 LIGHT CDR1
RASQSVSTSAYSYMH

SEQ ID NO: 611 - protein, 7 aa, Artificial Sequence
  MADE IN LAB - P28852158 LIGHT CDR2
LASNLES

SEQ ID NO: 612 - protein, 9 aa, Artificial Sequence
  MADE IN LAB - P28852158 LIGHT CDR3
QQSRELPYT

SEQ ID NO: 613 - protein, 5 aa, Artificial Sequence
  MADE IN LAB - P28862158 HEAVY CDR1
QNIIH

SEQ ID NO: 614 - protein, 17 aa, Artificial Sequence
  MADE IN LAB - P28862158 HEAVY CDR2
WIHPGSGAIKYAQKLQG

SEQ ID NO: 615 - protein, 11 aa, Artificial Sequence
  MADE IN LAB - P28862158 HEAVY CDR3
HGGTGRGAMDY

SEQ ID NO: 616 - protein, 15 aa, Artificial Sequence
  MADE IN LAB - P28862158 LIGHT CDR1
RASQSVSTSAYSYMH

SEQ ID NO: 617 - protein, 7 aa, Artificial Sequence
  MADE IN LAB - P28862158 LIGHT CDR2
LASNLES

SEQ ID NO: 618 - protein, 9 aa, Artificial Sequence
  MADE IN LAB - P28862158 LIGHT CDR3
QQSRELPYT

SEQ ID NO: 619 - protein, 5 aa, Artificial Sequence
  MADE IN LAB - P28872158 HEAVY CDR1
RNIIH

SEQ ID NO: 620 - protein, 17 aa, Artificial Sequence
  MADE IN LAB - P28872158 HEAVY CDR2
WIHPGSGAIKYAQKLQG

SEQ ID NO: 621 - protein, 11 aa, Artificial Sequence
  MADE IN LAB - P28872158 HEAVY CDR3
HGGTGRGAMDY

SEQ ID NO: 622 - protein, 15 aa, Artificial Sequence
  MADE IN LAB - P28872158 LIGHT CDR1
RASQSVSTSAYSYMH

SEQ ID NO: 623 - protein, 7 aa, Artificial Sequence
  MADE IN LAB - P28872158 LIGHT CDR2
LASNLES

SEQ ID NO: 624 - protein, 9 aa, Artificial Sequence
  MADE IN LAB - P28872158 LIGHT CDR3
QQSRELPYT

SEQ ID NO: 625 - protein, 5 aa, Artificial Sequence
  MADE IN LAB - P28882158 HEAVY CDR1
TNIIH

SEQ ID NO: 626 - protein, 17 aa, Artificial Sequence
  MADE IN LAB - P28882158 HEAVY CDR2
WIHPGSGAIKYAQKLQG

SEQ ID NO: 627 - protein, 11 aa, Artificial Sequence
  MADE IN LAB - P28882158 HEAVY CDR3
HGGTGRGAMDY

SEQ ID NO: 628 - protein, 15 aa, Artificial Sequence
  MADE IN LAB - P28882158 LIGHT CDR1
RASQSVSTSAYSYMH

SEQ ID NO: 629 - protein, 7 aa, Artificial Sequence
  MADE IN LAB - P28882158 LIGHT CDR2
LASNLES

SEQ ID NO: 630 - protein, 9 aa, Artificial Sequence
  MADE IN LAB - P28882158 LIGHT CDR3
QQSRELPYT

SEQ ID NO: 631 - protein, 5 aa, Artificial Sequence
  MADE IN LAB - P28892158 HEAVY CDR1
VNIIH

SEQ ID NO: 632 - protein, 17 aa, Artificial Sequence
  MADE IN LAB - P28892158 HEAVY CDR2
WIHPGSGAIKYAQKLQG

SEQ ID NO: 633 - protein, 11 aa, Artificial Sequence
  MADE IN LAB - P28892158 HEAVY CDR3
HGGTGRGAMDY

SEQ ID NO: 634 - protein, 14 aa, Artificial Sequence
  MADE IN LAB - P28892158 LIGHT CDR1
ASQSVSTSAYSYMH

SEQ ID NO: 635 - protein, 7 aa, Artificial Sequence
  MADE IN LAB - P28892158 LIGHT CDR2
LASNLES

SEQ ID NO: 636 - protein, 9 aa, Artificial Sequence
  MADE IN LAB - P28892158 LIGHT CDR3
QQSRELPYT

SEQ ID NO: 637 - protein, 5 aa, Artificial Sequence
  MADE IN LAB - P28902158 HEAVY CDR1
WNIIH

SEQ ID NO: 638 - protein, 17 aa, Artificial Sequence
  MADE IN LAB - P28902158 HEAVY CDR2
WIHPGSGAIKYAQKLQG

SEQ ID NO: 639 - protein, 11 aa, Artificial Sequence
  MADE IN LAB - P28902158 HEAVY CDR3
HGGTGRGAMDY

SEQ ID NO: 640 - protein, 15 aa, Artificial Sequence
  MADE IN LAB - P28902158 LIGHT CDR1
RASQSVSTSAYSYMH

SEQ ID NO: 641 - protein, 7 aa, Artificial Sequence
  MADE IN LAB - P28902158 LIGHT CDR2
LASNLES

SEQ ID NO: 642 - protein, 9 aa, Artificial Sequence
  MADE IN LAB - P28902158 LIGHT CDR3
QQSRELPYT

SEQ ID NO: 643 - protein, 5 aa, Artificial Sequence
  MADE IN LAB - P28912158 HEAVY CDR1
YNIIH

SEQ ID NO: 644 - protein, 17 aa, Artificial Sequence
  MADE IN LAB - P28912158 HEAVY CDR2
WIHPGSGAIKYAQKLQG

SEQ ID NO: 645 - protein, 11 aa, Artificial Sequence
  MADE IN LAB - P28912158 HEAVY CDR3
HGGTGRGAMDY

SEQ ID NO: 646 - protein, 15 aa, Artificial Sequence
  MADE IN LAB - P28912158 LIGHT CDR1
RASQSVSTSAYSYMH

SEQ ID NO: 647 - protein, 7 aa, Artificial Sequence
  MADE IN LAB - P28912158 LIGHT CDR2
LASNLES

SEQ ID NO: 648 - protein, 9 aa, Artificial Sequence
  MADE IN LAB - P28912158 LIGHT CDR3
QQSRELPYT

SEQ ID NO: 649 - protein, 5 aa, Artificial Sequence
  MADE IN LAB - P28922158 HEAVY CDR1
SNIIH

SEQ ID NO: 650 - protein, 17 aa, Artificial Sequence
  MADE IN LAB - P28922158 HEAVY CDR2
WIHPGSGDIKYAQKLQG

SEQ ID NO: 651 - protein, 11 aa, Artificial Sequence
  MADE IN LAB - P28922158 HEAVY CDR3
HGGTGRGAMDY

SEQ ID NO: 652 - protein, 15 aa, Artificial Sequence
  MADE IN LAB - P28922158 LIGHT CDR1
RASQSVSTSAYSYMH

SEQ ID NO: 653 - protein, 7 aa, Artificial Sequence
  MADE IN LAB - P28922158 LIGHT CDR2
LASNLES

SEQ ID NO: 654 - protein, 9 aa, Artificial Sequence
  MADE IN LAB - P28922158 LIGHT CDR3
QQSRELPYT

SEQ ID NO: 655 - protein, 5 aa, Artificial Sequence
  MADE IN LAB - P28932158 HEAVY CDR1
SNIIH

SEQ ID NO: 656 - protein, 17 aa, Artificial Sequence
  MADE IN LAB - P28932158 HEAVY CDR2
WIHPGSGEIKYAQKLQG

SEQ ID NO: 657 - protein, 11 aa, Artificial Sequence
  MADE IN LAB - P28932158 HEAVY CDR3
HGGTGRGAMDY

SEQ ID NO: 658 - protein, 15 aa, Artificial Sequence
  MADE IN LAB - P28932158 LIGHT CDR1
RASQSVSTSAYSYMH

SEQ ID NO: 659 - protein, 7 aa, Artificial Sequence
  MADE IN LAB - P28932158 LIGHT CDR2
LASNLES

SEQ ID NO: 660 - protein, 9 aa, Artificial Sequence
  MADE IN LAB - P28932158 LIGHT CDR3
QQSRELPYT

SEQ ID NO: 661 - protein, 5 aa, Artificial Sequence
  MADE IN LAB - P28942158 HEAVY CDR1
SNIIH

SEQ ID NO: 662 - protein, 17 aa, Artificial Sequence
  MADE IN LAB - P28942158 HEAVY CDR2
WIHPGSGFIKYAQKLQG

SEQ ID NO: 663 - protein, 11 aa, Artificial Sequence
  MADE IN LAB - P28942158 HEAVY CDR3
HGGTGRGAMDY

SEQ ID NO: 664 - protein, 15 aa, Artificial Sequence
  MADE IN LAB - P28942158 LIGHT CDR1
RASQSVSTSAYSYMH

SEQ ID NO: 665 - protein, 7 aa, Artificial Sequence
  MADE IN LAB - P28942158 LIGHT CDR2
LASNLES

SEQ ID NO: 666 - protein, 9 aa, Artificial Sequence
  MADE IN LAB - P28942158 LIGHT CDR3
QQSRELPYT

SEQ ID NO: 667 - protein, 5 aa, Artificial Sequence
  MADE IN LAB - P28952158 HEAVY CDR1
SNIIH

SEQ ID NO: 668 - protein, 17 aa, Artificial Sequence
  MADE IN LAB - P28952158 HEAVY CDR2
WIHPGSGGIKYAQKLQG

SEQ ID NO: 669 - protein, 11 aa, Artificial Sequence
  MADE IN LAB - P28952158 HEAVY CDR3
HGGTGRGAMDY

SEQ ID NO: 670 - protein, 15 aa, Artificial Sequence
  MADE IN LAB - P28952158 LIGHT CDR1
RASQSVSTSAYSYMH

SEQ ID NO: 671 - protein, 7 aa, Artificial Sequence
  MADE IN LAB - P28952158 LIGHT CDR2
LASNLES

SEQ ID NO: 672 - protein, 9 aa, Artificial Sequence
  MADE IN LAB - P28952158 LIGHT CDR3
QQSRELPYT

SEQ ID NO: 673 - protein, 5 aa, Artificial Sequence
  MADE IN LAB - P28962158 HEAVY CDR1
SNIIH

SEQ ID NO: 674 - protein, 17 aa, Artificial Sequence
  MADE IN LAB - P28962158 HEAVY CDR2
WIHPGSGHIKYAQKLQG

SEQ ID NO: 675 - protein, 11 aa, Artificial Sequence
  MADE IN LAB - P28962158 HEAVY CDR3
HGGTGRGAMDY

SEQ ID NO: 676 - protein, 15 aa, Artificial Sequence
  MADE IN LAB - P28962158 LIGHT CDR1
RASQSVSTSAYSYMH

SEQ ID NO: 677 - protein, 7 aa, Artificial Sequence
  MADE IN LAB - P28962158 LIGHT CDR2
LASNLES

SEQ ID NO: 678 - protein, 9 aa, Artificial Sequence
  MADE IN LAB - P28962158 LIGHT CDR3
QQSRELPYT

SEQ ID NO: 679 - protein, 5 aa, Artificial Sequence
  MADE IN LAB - P28972158 HEAVY CDR1
SNIIH

SEQ ID NO: 680 - protein, 17 aa, Artificial Sequence
  MADE IN LAB - P28972158 HEAVY CDR2
WIHPGSGIIKYAQKLQG

SEQ ID NO: 681 - protein, 11 aa, Artificial Sequence
  MADE IN LAB - P28972158 HEAVY CDR3
HGGTGRGAMDY

SEQ ID NO: 682 - protein, 15 aa, Artificial Sequence
  MADE IN LAB - P28972158 LIGHT CDR1
RASQSVSTSAYSYMH

SEQ ID NO: 683 - protein, 7 aa, Artificial Sequence
  MADE IN LAB - P28972158 LIGHT CDR2
LASNLES

SEQ ID NO: 684 - protein, 9 aa, Artificial Sequence
  MADE IN LAB - P28972158 LIGHT CDR3
QQSRELPYT

SEQ ID NO: 685 - protein, 5 aa, Artificial Sequence
  MADE IN LAB - P28982158 HEAVY CDR1
SNIIH

SEQ ID NO: 686 - protein, 17 aa, Artificial Sequence
  MADE IN LAB - P28982158 HEAVY CDR2
WIHPGSGKIKYAQKLQG

SEQ ID NO: 687 - protein, 11 aa, Artificial Sequence
  MADE IN LAB - P28982158 HEAVY CDR3
HGGTGRGAMDY

SEQ ID NO: 688 - protein, 15 aa, Artificial Sequence
  MADE IN LAB - P28982158 LIGHT CDR1
RASQSVSTSAYSYMH

SEQ ID NO: 689 - protein, 7 aa, Artificial Sequence
  MADE IN LAB - P28982158 LIGHT CDR2
LASNLES

SEQ ID NO: 690 - protein, 9 aa, Artificial Sequence
  MADE IN LAB - P28982158 LIGHT CDR3
QQSRELPYT

SEQ ID NO: 691 - protein, 5 aa, Artificial Sequence
  MADE IN LAB - P28992158 HEAVY CDR1
SNIIH

SEQ ID NO: 692 - protein, 17 aa, Artificial Sequence
  MADE IN LAB - P28992158 HEAVY CDR2
WIHPGSGLIKYAQKLQG

SEQ ID NO: 693 - protein, 11 aa, Artificial Sequence
  MADE IN LAB - P28992158 HEAVY CDR3
HGGTGRGAMDY

SEQ ID NO: 694 - protein, 15 aa, Artificial Sequence
  MADE IN LAB - P28992158 LIGHT CDR1
RASQSVSTSAYSYMH

SEQ ID NO: 695 - protein, 7 aa, Artificial Sequence
  MADE IN LAB - P28992158 LIGHT CDR2
LASNLES

SEQ ID NO: 696 - protein, 9 aa, Artificial Sequence
  MADE IN LAB - P28992158 LIGHT CDR3
QQSRELPYT

SEQ ID NO: 697 - protein, 5 aa, Artificial Sequence
  MADE IN LAB - P29002158 HEAVY CDR1
SNIIH

SEQ ID NO: 698 - protein, 17 aa, Artificial Sequence
  MADE IN LAB - P29002158 HEAVY CDR2
WIHPGSGMIKYAQKLQG

SEQ ID NO: 699 - protein, 11 aa, Artificial Sequence
  MADE IN LAB - P29002158 HEAVY CDR3
HGGTGRGAMDY

SEQ ID NO: 700 - protein, 15 aa, Artificial Sequence
  MADE IN LAB - P29002158 LIGHT CDR1
RASQSVSTSAYSYMH

SEQ ID NO: 701 - protein, 7 aa, Artificial Sequence
  MADE IN LAB - P29002158 LIGHT CDR2
LASNLES

SEQ ID NO: 702 - protein, 9 aa, Artificial Sequence
  MADE IN LAB - P29002158 LIGHT CDR3
QQSRELPYT

SEQ ID NO: 703 - protein, 5 aa, Artificial Sequence
  MADE IN LAB - P29012158 HEAVY CDR1
SNIIH

SEQ ID NO: 704 - protein, 17 aa, Artificial Sequence
  MADE IN LAB - P29012158 HEAVY CDR2
WIHPGSGNIKYAQKLQG

SEQ ID NO: 705 - protein, 11 aa, Artificial Sequence
  MADE IN LAB - P29012158 HEAVY CDR3
HGGTGRGAMDY

SEQ ID NO: 706 - protein, 15 aa, Artificial Sequence
  MADE IN LAB - P29012158 LIGHT CDR1
RASQSVSTSAYSYMH

SEQ ID NO: 707 - protein, 7 aa, Artificial Sequence
  MADE IN LAB - P29012158 LIGHT CDR2
LASNLES

SEQ ID NO: 708 - protein, 9 aa, Artificial Sequence
  MADE IN LAB - P29012158 LIGHT CDR3
QQSRELPYT

SEQ ID NO: 709 - protein, 5 aa, Artificial Sequence
  MADE IN LAB - P29022158 HEAVY CDR1
SNIIH

SEQ ID NO: 710 - protein, 17 aa, Artificial Sequence
  MADE IN LAB - P29022158 HEAVY CDR2
WIHPGSGPIKYAQKLQG

SEQ ID NO: 711 - protein, 11 aa, Artificial Sequence
  MADE IN LAB - P29022158 HEAVY CDR3
HGGTGRGAMDY

SEQ ID NO: 712 - protein, 15 aa, Artificial Sequence
  MADE IN LAB - P29022158 LIGHT CDR1
RASQSVSTSAYSYMH

SEQ ID NO: 713 - protein, 7 aa, Artificial Sequence
  MADE IN LAB - P29022158 LIGHT CDR2
LASNLES

SEQ ID NO: 714 - protein, 9 aa, Artificial Sequence
  MADE IN LAB - P29022158 LIGHT CDR3
QQSRELPYT

SEQ ID NO: 715 - protein, 5 aa, Artificial Sequence
  MADE IN LAB - P29032158 HEAVY CDR1
SNIIH

SEQ ID NO: 716 - protein, 17 aa, Artificial Sequence
  MADE IN LAB - P29032158 HEAVY CDR2
WIHPGSGQIKYAQKLQG

SEQ ID NO: 717 - protein, 11 aa, Artificial Sequence
  MADE IN LAB - P29032158 HEAVY CDR3
HGGTGRGAMDY

SEQ ID NO: 718 - protein, 15 aa, Artificial Sequence
  MADE IN LAB - P29032158 LIGHT CDR1
RASQSVSTSAYSYMH

SEQ ID NO: 719 - protein, 7 aa, Artificial Sequence
  MADE IN LAB - P29032158 LIGHT CDR2
LASNLES

SEQ ID NO: 720 - protein, 9 aa, Artificial Sequence
  MADE IN LAB - P29032158 LIGHT CDR3
QQSRELPYT

SEQ ID NO: 721 - protein, 5 aa, Artificial Sequence
  MADE IN LAB - P29042158 HEAVY CDR1
SNIIH

SEQ ID NO: 722 - protein, 17 aa, Artificial Sequence
  MADE IN LAB - P29042158 HEAVY CDR2
WIHPGSGRIKYAQKLQG

SEQ ID NO: 723 - protein, 11 aa, Artificial Sequence
  MADE IN LAB - P29042158 HEAVY CDR3
HGGTGRGAMDY

SEQ ID NO: 724 - protein, 15 aa, Artificial Sequence
  MADE IN LAB - P29042158 LIGHT CDR1
RASQSVSTSAYSYMH

SEQ ID NO: 725 - protein, 7 aa, Artificial Sequence
  MADE IN LAB - P29042158 LIGHT CDR2
LASNLES

SEQ ID NO: 726 - protein, 9 aa, Artificial Sequence
  MADE IN LAB - P29042158 LIGHT CDR3
QQSRELPYT

SEQ ID NO: 727 - protein, 5 aa, Artificial Sequence
  MADE IN LAB - P29052158 HEAVY CDR1
SNIIH

SEQ ID NO: 728 - protein, 17 aa, Artificial Sequence
  MADE IN LAB - P29052158 HEAVY CDR2
WIHPGSGTIKYAQKLQG

SEQ ID NO: 729 - protein, 11 aa, Artificial Sequence
  MADE IN LAB - P29052158 HEAVY CDR3
HGGTGRGAMDY

SEQ ID NO: 730 - protein, 15 aa, Artificial Sequence
  MADE IN LAB - P29052158 LIGHT CDR1
RASQSVSTSAYSYMH

SEQ ID NO: 731 - protein, 7 aa, Artificial Sequence
  MADE IN LAB - P29052158 LIGHT CDR2
LASNLES

SEQ ID NO: 732 - protein, 9 aa, Artificial Sequence
  MADE IN LAB - P29052158 LIGHT CDR3
QQSRELPYT

SEQ ID NO: 733 - protein, 5 aa, Artificial Sequence
  MADE IN LAB - P29062158 HEAVY CDR1
SNIIH

SEQ ID NO: 734 - protein, 17 aa, Artificial Sequence
  MADE IN LAB - P29062158 HEAVY CDR2
WIHPGSGVIKYAQKLQG

SEQ ID NO: 735 - protein, 11 aa, Artificial Sequence
  MADE IN LAB - P29062158 HEAVY CDR3
HGGTGRGAMDY

SEQ ID NO: 736 - protein, 15 aa, Artificial Sequence
  MADE IN LAB - P29062158 LIGHT CDR1
RASQSVSTSAYSYMH

SEQ ID NO: 737 - protein, 7 aa, Artificial Sequence
  MADE IN LAB - P29062158 LIGHT CDR2
LASNLES

SEQ ID NO: 738 - protein, 9 aa, Artificial Sequence
  MADE IN LAB - P29062158 LIGHT CDR3
QQSRELPYT

SEQ ID NO: 739 - protein, 5 aa, Artificial Sequence
  MADE IN LAB - P29072158 HEAVY CDR1
SNIIH

SEQ ID NO: 740 - protein, 17 aa, Artificial Sequence
  MADE IN LAB - P29072158 HEAVY CDR2
WIHPGSGWIKYAQKLQG

SEQ ID NO: 741 - protein, 11 aa, Artificial Sequence
  MADE IN LAB - P29072158 HEAVY CDR3
HGGTGRGAMDY

SEQ ID NO: 742 - protein, 14 aa, Artificial Sequence
  MADE IN LAB - P29072158 LIGHT CDR1
ASQSVSTSAYSYMH

SEQ ID NO: 743 - protein, 7 aa, Artificial Sequence
  MADE IN LAB - P29072158 LIGHT CDR2
LASNLES

SEQ ID NO: 744 - protein, 9 aa, Artificial Sequence
  MADE IN LAB - P29072158 LIGHT CDR3
QQSRELPYT

SEQ ID NO: 745 - protein, 5 aa, Artificial Sequence
  MADE IN LAB - P29082158 HEAVY CDR1
SNIIH

SEQ ID NO: 746 - protein, 17 aa, Artificial Sequence
  MADE IN LAB - P29082158 HEAVY CDR2
WIHPGSGYIKYAQKLQG

SEQ ID NO: 747 - protein, 11 aa, Artificial Sequence
  MADE IN LAB - P29082158 HEAVY CDR3
HGGTGRGAMDY

SEQ ID NO: 748 - protein, 15 aa, Artificial Sequence
  MADE IN LAB - P29082158 LIGHT CDR1
RASQSVSTSAYSYMH

SEQ ID NO: 749 - protein, 7 aa, Artificial Sequence
  MADE IN LAB - P29082158 LIGHT CDR2
LASNLES

SEQ ID NO: 750 - protein, 9 aa, Artificial Sequence
  MADE IN LAB - P29082158 LIGHT CDR3
QQSRELPYT

SEQ ID NO: 751 - protein, 450 aa, Artificial Sequence
  Made in Lab - Exemplary Heavy Chain Sequence
EVQLVQSGAEVKKPGESLKISCKGSGYTFTENIIHWVRQMPGKGLEWIGWFHPGSGSIKYNEKFKDQVTISADKSISTAYLQWSSLKASDTAMYFCARHGGTGRGAMDYWGQGTLVTVSSASTKGPSVFPLAPSSKSTSGGTAALGCLVKDYFPEPVTVSWNSGALTSGVHTFPAVLQSSGLYSLSSVVTVPSSSLGTQTYICNVNHKPSNTKVDKKVEPKSCDKTHTCPPCPAPELLGGPSVFLFPPKPKDTLMISRTPEVTCVVVDVSHEDPEVKFNWYVDGVEVHNAKTKPREEQYNSTYRVVSVLTVLHQDWLNGKEYKCKVSNKALPAPIEKTISKAKGQPREPQVYTLPPSRDELTKNQVSLTCLVKGFYPSDIAVEWESNGQPENNYKTTPPVLDSDGSFFLYSKLTVDKSRWQQGNVFSCSVMHEALHNHYTQKSLSLSPGK

SEQ ID NO: 752 - protein, 218 aa, Artificial Sequence
  Made in Lab - Exemplary Light Chain Sequence
DIVMTQTPLSLSVTPGQPASISCRASKSVSTSAYSYMHWYLQKPGQSPQLLIYLASNLESGVPDRFSGSGSGTDFTLKISRVEAEDVGVYYCQHSRELPYTFGQGTKLEIKRTVAAPSVFIFPPSDEQLKSGTASVVCLLNNFYPREAKVQWKVDNALQSGNSQESVTEQDSKDSTYSLSSTLTLSKADYEKHKVYACEVTHQGLSSPVTKSFNRGEC

SEQ ID NO: 753 - protein, 450 aa, Artificial Sequence
  Made in Lab - Exemplary Heavy Chain Sequence
EVQLVQSGAEVKKPGESLKISCKGSGYTFTENIIHWVRQMPGKGLEWIGWFHPGSGSIKYNEKFKDQVTISADKSISTAYLQWSSLKASDTAMYFCARHGGTGRGAMDYWGQGTLVTVSSASTKGPSVFPLAPSSKSTSGGTAALGCLVKDYFPEPVTVSWNSGALTSGVHTFPAVLQSSGLYSLSSVVTVPSSSLGTQTYICNVNHKPSNTKVDKKVEPKSCDKTHTCPPCPAPEAAGGPSVFLFPPKPKDTLMISRTPEVTCVVVDVSHEDPEVKFNWYVDGVEVHNAKTKPREEQYNSTYRVVSVLTVLHQDWLNGKEYKCKVSNKALAAPIEKTISKAKGQPREPQVYTLPPSRDELTKNQVSLTCLVKGFYPSDIAVEWESNGQPENNYKTTPPVLDSDGSFFLYSKLTVDKSRWQQGNVFSCSVMHEALHNHYTQKSLSLSPGK

SEQ ID NO: 754 - protein, 218 aa, Artificial Sequence; identical to SEQ ID NO: 752
  Made in Lab - Exemplary Light Chain Sequence

SEQ ID NO: 755 - protein, 450 aa, Artificial Sequence; identical to SEQ ID NO: 753
  Made in Lab - Exemplary Heavy Chain Sequence

SEQ ID NO: 756 - protein, 218 aa, Artificial Sequence
  Made in Lab - Exemplary Light Chain Sequence
DIVMTQTPLSLSVTPGQPASISCRASKSVSTSAYSYMHWYLQKPGQSPQLLIYLASNRESGVPDRFSGSGSGTDFTLKISRVEAEDVGVYYCMQSRELPYTFGQGTKLEIKRTVAAPSVFIFPPSDEQLKSGTASVVCLLNNFYPREAKVQWKVDNALQSGNSQESVTEQDSKDSTYSLSSTLTLSKADYEKHKVYACEVTHQGLSSPVTKSFNRGEC

SEQ ID NO: 757 - protein, 450 aa, Artificial Sequence; identical to SEQ ID NO: 753
  Made in Lab - Exemplary Heavy Chain Sequence

SEQ ID NO: 758 - protein, 218 aa, Artificial Sequence
  Made in Lab - Exemplary Light Chain Sequence
DIQMTQSPSSLSASVGDRVTITCRASQSISTSAYSYMHWYQQKPGKAPKLLIYLASNLESGVPSRFSGSGSGTDFTLTISSLQPEDFATYYCQQSRELPYTFGQGTKLEIKRTVAAPSVFIFPPSDEQLKSGTASVVCLLNNFYPREAKVQWKVDNALQSGNSQESVTEQDSKDSTYSLSSTLTLSKADYEKHKVYACEVTHQGLSSPVTKSFNRGEC

SEQ ID NO: 759 - protein, 450 aa, Artificial Sequence
  Made in Lab - Exemplary Heavy Chain Sequence
EVQLVQSGAEVKKPGESLKISCKGSGYTFTENIIHWVRQMPGKGLEWIGIIHPGSGSIKYSPSFQGQVTISADKSISTAYLQWSSLKASDTAMYFCARHGGTGRGAMDYWGQGTLVTVSSASTKGPSVFPLAPSSKSTSGGTAALGCLVKDYFPEPVTVSWNSGALTSGVHTFPAVLQSSGLYSLSSVVTVPSSSLGTQTYICNVNHKPSNTKVDKKVEPKSCDKTHTCPPCPAPEAAGGPSVFLFPPKPKDTLMISRTPEVTCVVVDVSHEDPEVKFNWYVDGVEVHNAKTKPREEQYNSTYRVVSVLTVLHQDWLNGKEYKCKVSNKALAAPIEKTISKAKGQPREPQVYTLPPSRDELTKNQVSLTCLVKGFYPSDIAVEWESNGQPENNYKTTPPVLDSDGSFFLYSKLTVDKSRWQQGNVFSCSVMHEALHNHYTQKSLSLSPGK

SEQ ID NO: 760 - protein, 218 aa, Artificial Sequence; identical to SEQ ID NO: 752
  Made in Lab - Exemplary Light Chain Sequence

SEQ ID NO: 761 - protein, 450 aa, Artificial Sequence; identical to SEQ ID NO: 759
  Made in Lab - Exemplary Heavy Chain Sequence

SEQ ID NO: 762 - protein, 218 aa, Artificial Sequence; identical to SEQ ID NO: 756
  Made in Lab - Exemplary Light Chain Sequence

SEQ ID NO: 763 - protein, 450 aa, Artificial Sequence; identical to SEQ ID NO: 759
  Made in Lab - Exemplary Heavy Chain Sequence

SEQ ID NO: 764 - protein, 218 aa, Artificial Sequence; identical to SEQ ID NO: 758
  Made in Lab - Exemplary Light Chain Sequence

SEQ ID NO: 765 - protein, 450 aa, Artificial Sequence
  Made in Lab - Exemplary Heavy Chain Sequence
QVQLVQSGAEVKKPGASVKVSCKASGYTFTENIIHWVRQAPGQGLEWMGWIHPGSGSIKYAQKLQGRVTMTTDTSTSTAYMELRSLRSDDTAVYYCARHGGTGRGAMDYWGQGTLVTVSSASTKGPSVFPLAPSSKSTSGGTAALGCLVKDYFPEPVTVSWNSGALTSGVHTFPAVLQSSGLYSLSSVVTVPSSSLGTQTYICNVNHKPSNTKVDKKVEPKSCDKTHTCPPCPAPEAAGGPSVFLFPPKPKDTLMISRTPEVTCVVVDVSHEDPEVKFNWYVDGVEVHNAKTKPREEQYNSTYRVVSVLTVLHQDWLNGKEYKCKVSNKALAAPIEKTISKAKGQPREPQVYTLPPSRDELTKNQVSLTCLVKGFYPSDIAVEWESNGQPENNYKTTPPVLDSDGSFFLYSKLTVDKSRWQQGNVFSCSVMHEALHNHYTQKSLSLSPGK

SEQ ID NO: 766 - protein, 218 aa, Artificial Sequence
  Made in Lab - Exemplary Light Chain Sequence
EIVLTQSPGTLSLSPGERATLSCRASQSVSTSAYSYMHWYQQKPGQAPRLLIYLASNLESGIPDRFSGSGSGTDFTLTISRLEPEDFAVYYCQQSRELPYTFGQGTKLEIKRTVAAPSVFIFPPSDEQLKSGTASVVCLLNNFYPREAKVQWKVDNALQSGNSQESVTEQDSKDSTYSLSSTLTLSKADYEKHKVYACEVTHQGLSSPVTKSFNRGEC

SEQ ID NO: 767 - protein, 450 aa, Artificial Sequence; identical to SEQ ID NO: 765
  Made in Lab - Exemplary Heavy Chain Sequence

SEQ ID NO: 768 - protein, 218 aa, Artificial Sequence
  Made in Lab - Exemplary Light Chain Sequence
EIVLTQSPGTLSLSPGERATLSCRASQSVSTSAYSYMHWYQQKPGQAPRLLIYLASNRETGIPDRFSGSGSGTDFTLTISRLEPEDFAVYYCQQSRELPYTFGQGTKLEIKRTVAAPSVFIFPPSDEQLKSGTASVVCLLNNFYPREAKVQWKVDNALQSGNSQESVTEQDSKDSTYSLSSTLTLSKADYEKHKVYACEVTHQGLSSPVTKSFNRGEC

SEQ ID NO: 769 - protein, 450 aa, Artificial Sequence
  Made in Lab - Exemplary Heavy Chain Sequence
EVQLLESGGGLVQPGGSLRLSCAASGFTFSENIIHWVRQAPGKGLEWVSAIHPGSGSIKYADSVKGRFTISRDNSKNTLYLQMNSLRAEDTAVYYCAKHGGTGRGAMDYWGQGTLVTVSSASTKGPSVFPLAPSSKSTSGGTAALGCLVKDYFPEPVTVSWNSGALTSGVHTFPAVLQSSGLYSLSSVVTVPSSSLGTQTYICNVNHKPSNTKVDKKVEPKSCDKTHTCPPCPAPEAAGGPSVFLFPPKPKDTLMISRTPEVTCVVVDVSHEDPEVKFNWYVDGVEVHNAKTKPREEQYNSTYRVVSVLTVLHQDWLNGKEYKCKVSNKALAAPIEKTISKAKGQPREPQVYTLPPSRDELTKNQVSLTCLVKGFYPSDIAVEWESNGQPENNYKTTPPVLDSDGSFFLYSKLTVDKSRWQQGNVFSCSVMHEALHNHYTQKSLSLSPGK

SEQ ID NO: 770 - protein, 218 aa, Artificial Sequence; identical to SEQ ID NO: 758
  Made in Lab - Exemplary Light Chain Sequence

SEQ ID NO: 771 - protein, 450 aa, Artificial Sequence; identical to SEQ ID NO: 769
  Made in Lab - Exemplary Heavy Chain Sequence

SEQ ID NO: 772 - protein, 218 aa, Artificial Sequence
  Made in Lab - Exemplary Light Chain Sequence
EIVMTQSPATLSVSPGERATLSCRASQSVSTSAYSYMHWYQQKPGQAPRLLIYLASNLESGIPARFSGSGSGTEFTLTISSLQSEDFAVYYCQQSRELPYTFGQGTKLEIKRTVAAPSVFIFPPSDEQLKSGTASVVCLLNNFYPREAKVQWKVDNALQSGNSQESVTEQDSKDSTYSLSSTLTLSKADYEKHKVYACEVTHQGLSSPVTKSFNRGEC

SEQ ID NO: 773 - protein, 450 aa, Artificial Sequence; identical to SEQ ID NO: 769
  Made in Lab - Exemplary Heavy Chain Sequence

SEQ ID NO: 774 - protein, 218 aa, Artificial Sequence
  Made in Lab - Exemplary Light Chain Sequence
EIVMTQSPATLSVSPGERATLSCRASQSVSTSAYSYMHWYQQKPGQAPRLLIYLASNRETGIPARFSGSGSGTEFTLTISSLQSEDFAVYYCQQSRELPYTFGQGTKLEIKRTVAAPSVFIFPPSDEQLKSGTASVVCLLNNFYPREAKVQWKVDNALQSGNSQESVTEQDSKDSTYSLSSTLTLSKADYEKHKVYACEVTHQGLSSPVTKSFNRGEC

SEQ ID NO: 775 - protein, 450 aa, Artificial Sequence
  Made in Lab - Exemplary Heavy Chain Sequence
QVQLVQSGAEVKKPGASVKVSCKASGYTFTENIIHWVRQAPGQGLEWMGWIHPGSGSIKYAQKLQGRVTMTTDTSTSTAYMELRSLRSDDTAVYYCARHGGTGRGAMDYWGQGTLVTVSSASTKGPSVFPLAPSSKSTSGGTAALGCLVKDYFPEPVTVSWNSGALTSGVHTFPAVLQSSGLYSLSSVVTVPSSSLGTQTYICNVNHKPSNTKVDKKVEPKSCDKTHTCPPCPAPELLGGPSVFLFPPKPKDTLMISRTPEVTCVVVDVSHEDPEVKFNWYVDGVEVHNAKTKPREEQYNSTYRVVSVLTVLHQDWLNGKEYKCKVSNKALPAPIEKTISKAKGQPREPQVYTLPPSRDELTKNQVSLTCLVKGFYPSDIAVEWESNGQPENNYKTTPPVLDSDGSFFLYSKLTVDKSRWQQGNVFSCSVMHEALHNHYTQKSLSLSPGK

SEQ ID NO: 776 - protein, 218 aa, Artificial Sequence; identical to SEQ ID NO: 766
  Made in Lab - Exemplary Light Chain Sequence

SEQ ID NO: 777 - protein, 450 aa, Artificial Sequence; identical to SEQ ID NO: 775
  Made in Lab - Exemplary Heavy Chain Sequence

SEQ ID NO: 778 - protein, 218 aa, Artificial Sequence
  Made in Lab - Exemplary Light Chain Sequence
EIVLTQSPGTLSLSPGERATLSCRASQSVSASAYSYMHWYQQKPGQAPRLLIYLASNLESGIPDRFSGSGSGTDFTLTISRLEPEDFAVYYCQQSRELPYTFGQGTKLEIKRTVAAPSVFIFPPSDEQLKSGTASVVCLLNNFYPREAKVQWKVDNALQSGNSQESVTEQDSKDSTYSLSSTLTLSKADYEKHKVYACEVTHQGLSSPVTKSFNRGEC

SEQ ID NO: 779 - protein, 450 aa, Artificial Sequence; identical to SEQ ID NO: 775
  Made in Lab - Exemplary Heavy Chain Sequence

SEQ ID NO: 780 - protein, 218 aa, Artificial Sequence
  Made in Lab - Exemplary Light Chain Sequence
EIVLTQSPGTLSLSPGERATLSCRASQSVSTAAYSYMHWYQQKPGQAPRLLIYLASNLESGIPDRFSGSGSGTDFTLTISRLEPEDFAVYYCQQSRELPYTFGQGTKLEIKRTVAAPSVFIFPPSDEQLKSGTASVVCLLNNFYPREAKVQWKVDNALQSGNSQESVTEQDSKDSTYSLSSTLTLSKADYEKHKVYACEVTHQGLSSPVTKSFNRGEC

SEQ ID NO: 781 - protein, 450 aa, Artificial Sequence; identical to SEQ ID NO: 775
  Made in Lab - Exemplary Heavy Chain Sequence

SEQ ID NO: 782 - protein, 218 aa, Artificial Sequence
  Made in Lab - Exemplary Light Chain Sequence
EIVLTQSPGTLSLSPGERATLSCRASQSVSTSAASYMHWYQQKPGQAPRLLIYLASNLESGIPDRFSGSGSGTDFTLTISRLEPEDFAVYYCQQSRELPYTFGQGTKLEIKRTVAAPSVFIFPPSDEQLKSGTASVVCLLNNFYPREAKVQWKVDNALQSGNSQESVTEQDSKDSTYSLSSTLTLSKADYEKHKVYACEVTHQGLSSPVTKSFNRGEC

SEQ ID NO: 783 - protein, 450 aa, Artificial Sequence; identical to SEQ ID NO: 775
  Made in Lab - Exemplary Heavy Chain Sequence

SEQ ID NO: 784 - protein, 218 aa, Artificial Sequence
  Made in Lab - Exemplary Light Chain Sequence
EIVLTQSPGTLSLSPGERATLSCRASQSVSTSAYAYMHWYQQKPGQAPRLLIYLASNLESGIPDRFSGSGSGTDFTLTISRLEPEDFAVYYCQQSRELPYTFGQGTKLEIKRTVAAPSVFIFPPSDEQLKSGTASVVCLLNNFYPREAKVQWKVDNALQSGNSQESVTEQDSKDSTYSLSSTLTLSKADYEKHKVYACEVTHQGLSSPVTKSFNRGEC

SEQ ID NO: 785 - protein, 450 aa, Artificial Sequence; identical to SEQ ID NO: 775
  Made in Lab - Exemplary Heavy Chain Sequence

SEQ ID NO: 786 - protein, 218 aa, Artificial Sequence
  Made in Lab - Exemplary Light Chain Sequence
EIVLTQSPGTLSLSPGERATLSCRASQSVSTSAYSAMHWYQQKPGQAPRLLIYLASNLESGIPDRFSGSGSGTDFTLTISRLEPEDFAVYYCQQSRELPYTFGQGTKLEIKRTVAAPSVFIFPPSDEQLKSGTASVVCLLNNFYPREAKVQWKVDNALQSGNSQESVTEQDSKDSTYSLSSTLTLSKADYEKHKVYACEVTHQGLSSPVTKSFNRGEC

SEQ ID NO: 787 - protein, 450 aa, Artificial Sequence; identical to SEQ ID NO: 775
  Made in Lab - Exemplary Heavy Chain Sequence

SEQ ID NO: 788 - protein, 218 aa, Artificial Sequence
  Made in Lab - Exemplary Light Chain Sequence
EIVLTQSPGTLSLSPGERATLSCRASQSVSTSAYSYMAWYQQKPGQAPRLLIYLASNLESGIPDRFSGSGSGTDFTLTISRLEPEDFAVYYCQQSRELPYTFGQGTKLEIKRTVAAPSVFIFPPSDEQLKSGTASVVCLLNNFYPREAKVQWKVDNALQSGNSQESVTEQDSKDSTYSLSSTLTLSKADYEKHKVYACEVTHQGLSSPVTKSFNRGEC

SEQ ID NO: 789 - protein, 450 aa, Artificial Sequence; identical to SEQ ID NO: 775
  Made in Lab - Exemplary Heavy Chain Sequence

SEQ ID NO: 790 - protein, 218 aa, Artificial Sequence
  Made in Lab - Exemplary Light Chain Sequence
EIVLTQSPGTLSLSPGERATLSCRASQSVSTSAYSYMHWYQQKPGQAPRLLIYAASNLESGIPDRFSGSGSGTDFTLTISRLEPEDFAVYYCQQSRELPYTFGQGTKLEIKRTVAAPSVFIFPPSDEQLKSGTASVVCLLNNFYPREAKVQWKVDNALQSGNSQESVTEQDSKDSTYSLSSTLTLSKADYEKHKVYACEVTHQGLSSPVTKSFNRGEC

SEQ ID NO: 791 - protein, 450 aa, Artificial Sequence; identical to SEQ ID NO: 775
  Made in Lab - Exemplary Heavy Chain Sequence

SEQ ID NO: 792 - protein, 218 aa, Artificial Sequence
  Made in Lab - Exemplary Light Chain Sequence
EIVLTQSPGTLSLSPGERATLSCRASQSVSTSAYSYMHWYQQKPGQAPRLLIYLAANLESGIPDRFSGSGSGTDFTLTISRLEPEDFAVYYCQQSRELPYTFGQGTKLEIKRTVAAPSVFIFPPSDEQLKSGTASVVCLLNNFYPREAKVQWKVDNALQSGNSQESVTEQDSKDSTYSLSSTLTLSKADYEKHKVYACEVTHQGLSSPVTKSFNRGEC

SEQ ID NO: 793 - protein, 450 aa, Artificial Sequence; identical to SEQ ID NO: 775
  Made in Lab - Exemplary Heavy Chain Sequence

SEQ ID NO: 794 - protein, 218 aa, Artificial Sequence
  Made in Lab - Exemplary Light Chain Sequence
EIVLTQSPGTLSLSPGERATLSCRASQSVSTSAYSYMHWYQQKPGQAPRLLIYLASALESGIPDRFSGSGSGTDFTLTISRLEPEDFAVYYCQQSRELPYTFGQGTKLEIKRTVAAPSVFIFPPSDEQLKSGTASVVCLLNNFYPREAKVQWKVDNALQSGNSQESVTEQDSKDSTYSLSSTLTLSKADYEKHKVYACEVTHQGLSSPVTKSFNRGEC

SEQ ID NO: 795 - protein, 450 aa, Artificial Sequence; identical to SEQ ID NO: 775
  Made in Lab - Exemplary Heavy Chain Sequence

SEQ ID NO: 796 - protein, 218 aa, Artificial Sequence
  Made in Lab - Exemplary Light Chain Sequence
EIVLTQSPGTLSLSPGERATLSCRASQSVSTSAYSYMHWYQQKPGQAPRLLIYLASNAESGIPDRFSGSGSGTDFTLTISRLEPEDFAVYYCQQSRELPYTFGQGTKLEIKRTVAAPSVFIFPPSDEQLKSGTASVVCLLNNFYPREAKVQWKVDNALQSGNSQESVTEQDSKDSTYSLSSTLTLSKADYEKHKVYACEVTHQGLSSPVTKSFNRGEC

SEQ ID NO: 797 - protein, 450 aa, Artificial Sequence; identical to SEQ ID NO: 775
  Made in Lab - Exemplary Heavy Chain Sequence

SEQ ID NO: 798 - protein, 218 aa, Artificial Sequence
  Made in Lab - Exemplary Light Chain Sequence
EIVLTQSPGTLSLSPGERATLSCRASQSVSTSAYSYMHWYQQKPGQAPRLLIYLASNLASGIPDRFSGSGSGTDFTLTISRLEPEDFAVYYCQQSRELPYTFGQGTKLEIKRTVAAPSVFIFPPSDEQLKSGTASVVCLLNNFYPREAKVQWKVDNALQSGNSQESVTEQDSKDSTYSLSSTLTLSKADYEKHKVYACEVTHQGLSSPVTKSFNRGEC

SEQ ID NO: 799 - protein, 450 aa, Artificial Sequence; identical to SEQ ID NO: 775
  Made in Lab - Exemplary Heavy Chain Sequence

SEQ ID NO: 800 - protein, 218 aa, Artificial Sequence
  Made in Lab - Exemplary Light Chain Sequence
EIVLTQSPGTLSLSPGERATLSCRASQSVSTSAYSYMHWYQQKPGQAPRLLIYLASNLEAGIPDRFSGSGSGTDFTLTISRLEPEDFAVYYCQQSRELPYTFGQGTKLEIKRTVAAPSVFIFPPSDEQLKSGTASVVCLLNNFYPREAKVQWKVDNALQSGNSQESVTEQDSKDSTYSLSSTLTLSKADYEKHKVYACEVTHQGLSSPVTKSFNRGEC

SEQ ID NO: 801 - protein, 450 aa, Artificial Sequence; identical to SEQ ID NO: 775
  Made in Lab - Exemplary Heavy Chain Sequence

SEQ ID NO: 802 - protein, 218 aa, Artificial Sequence
  Made in Lab - Exemplary Light Chain Sequence
EIVLTQSPGTLSLSPGERATLSCRASQSVSTSAYSYMHWYQQKPGQAPRLLIYLASNLESGIPDRFSGSGSGTDFTLTISRLEPEDFAVYYCQQARELPYTFGQGTKLEIKRTVAAPSVFIFPPSDEQLKSGTASVVCLLNNFYPREAKVQWKVDNALQSGNSQESVTEQDSKDSTYSLSSTLTLSKADYEKHKVYACEVTHQGLSSPVTKSFNRGEC

SEQ ID NO: 803 - protein, 450 aa, Artificial Sequence; identical to SEQ ID NO: 775
  Made in Lab - Exemplary Heavy Chain Sequence

SEQ ID NO: 804 - protein, 218 aa, Artificial Sequence
  Made in Lab - Exemplary Light Chain Sequence
EIVLTQSPGTLSLSPGERATLSCRASQSVSTSAYSYMHWYQQKPGQAPRLLIYLASNLESGIPDRFSGSGSGTDFTLTISRLEPEDFAVYYCQQSAELPYTFGQGTKLEIKRTVAAPSVFIFPPSDEQLKSGTASVVCLLNNFYPREAKVQWKVDNALQSGNSQESVTEQDSKDSTYSLSSTLTLSKADYEKHKVYACEVTHQGLSSPVTKSFNRGEC

SEQ ID NO: 805 - protein, 450 aa, Artificial Sequence; identical to SEQ ID NO: 775
  Made in Lab - Exemplary Heavy Chain Sequence

SEQ ID NO: 806 - protein, 218 aa, Artificial Sequence
  Made in Lab - Exemplary Light Chain Sequence
EIVLTQSPGTLSLSPGERATLSCRASQSVSTSAYSYMHWYQQKPGQAPRLLIYLASNLESGIPDRFSGSGSGTDFTLTISRLEPEDFAVYYCQQSRALPYTFGQGTKLEIKRTVAAPSVFIFPPSDEQLKSGTASVVCLLNNFYPREAKVQWKVDNALQSGNSQESVTEQDSKDSTYSLSSTLTLSKADYEKHKVYACEVTHQGLSSPVTKSFNRGEC

SEQ ID NO: 807 - protein, 450 aa, Artificial Sequence; identical to SEQ ID NO: 775
  Made in Lab - Exemplary Heavy Chain Sequence

SEQ ID NO: 808 - protein, 218 aa, Artificial Sequence
  Made in Lab - Exemplary Light Chain Sequence
EIVLTQSPGTLSLSPGERATLSCRASQSVSTSAYSYMHWYQQKPGQAPRLLIYLASNLESGIPDRFSGSGSGTDFTLTISRLEPEDFAVYYCQQSREAPYTFGQGTKLEIKRTVAAPSVFIFPPSDEQLKSGTASVVCLLNNFYPREAKVQWKVDNALQSGNSQESVTEQDSKDSTYSLSSTLTLSKADYEKHKVYACEVTHQGLSSPVTKSFNRGEC

SEQ ID NO: 809 - protein, 450 aa, Artificial Sequence; identical to SEQ ID NO: 775
  Made in Lab - Exemplary Heavy Chain Sequence

SEQ ID NO: 810 - protein, 218 aa, Artificial Sequence
  Made in Lab - Exemplary Light Chain Sequence
EIVLTQSPGTLSLSPGERATLSCRASQSVSTSAYSYMHWYQQKPGQAPRLLIYAASNLESGIPDRFSGSGSGTDFTLTISRLEPEDFAVYYCQQSREAPYTFGQGTKLEIKRTVAAPSVFIFPPSDEQLKSGTASVVCLLNNFYPREAKVQWKVDNALQSGNSQESVTEQDSKDSTYSLSSTLTLSKADYEKHKVYACEVTHQGLSSPVTKSFNRGEC

SEQ ID NO: 811 - protein, 450 aa, Artificial Sequence; identical to SEQ ID NO: 775
  Made in Lab - Exemplary Heavy Chain Sequence

SEQ ID NO: 812 - protein, 218 aa, Artificial Sequence
  Made in Lab - Exemplary Light Chain Sequence
EIVLTQSPGTLSLSPGERATLSCRASQSVSTSAYSYMHWYQQKPGQAPRLLIYGASNLESGIPDRFSGSGSGTDFTLTISRLEPEDFAVYYCQQSREAPYTFGQGTKLEIKRTVAAPSVFIFPPSDEQLKSGTASVVCLLNNFYPREAKVQWKVDNALQSGNSQESVTEQDSKDSTYSLSSTLTLSKADYEKHKVYACEVTHQGLSSPVTKSFNRGEC

SEQ ID NO: 813 - protein, 450 aa, Artificial Sequence; identical to SEQ ID NO: 775
  Made in Lab - Exemplary Heavy Chain Sequence

SEQ ID NO: 814 - protein, 218 aa, Artificial Sequence
  Made in Lab - Exemplary Light Chain Sequence
EIVLTQSPGTLSLSPGERATLSCRASQSVSTSAYSYMHWYQQKPGQAPRLLIYGASNLESGIPDRFSGSGSGTDFTLTISRLEPEDFAVYYCQQSREYPYTFGQGTKLEIKRTVAAPSVFIFPPSDEQLKSGTASVVCLLNNFYPREAKVQWKVDNALQSGNSQESVTEQDSKDSTYSLSSTLTLSKADYEKHKVYACEVTHQGLSSPVTKSFNRGEC

SEQ ID NO: 815 - protein, 450 aa, Artificial Sequence
  Made in Lab - Exemplary Heavy Chain Sequence
QVQLVQSGAEVKKPGASVKVSCKASGYTFTANIIHWVRQAPGQGLEWMGWIHPGSGSIKYAQKLQGRVTMTTDTSTSTAYMELRSLRSDDTAVYYCARHGGTGRGAMDYWGQGTLVTVSSASTKGPSVFPLAPSSKSTSGGTAALGCLVKDYFPEPVTVSWNSGALTSGVHTFPAVLQSSGLYSLSSVVTVPSSSLGTQTYICNVNHKPSNTKVDKKVEPKSCDKTHTCPPCPAPELLGGPSVFLFPPKPKDTLMISRTPEVTCVVVDVSHEDPEVKFNWYVDGVEVHNAKTKPREEQYNSTYRVVSVLTVLHQDWLNGKEYKCKVSNKALPAPIEKTISKAKGQPREPQVYTLPPSRDELTKNQVSLTCLVKGFYPSDIAVEWESNGQPENNYKTTPPVLDSDGSFFLYSKLTVDKSRWQQGNVFSCSVMHEALHNHYTQKSLSLSPGK

SEQ ID NO: 816 - protein, 218 aa, Artificial Sequence; identical to SEQ ID NO: 766
  Made in Lab - Exemplary Light Chain Sequence

SEQ ID NO: 817 - protein, 450 aa, Artificial Sequence; identical to SEQ ID NO: 815
  Made in Lab - Exemplary Heavy Chain Sequence

SEQ ID NO: 818 - protein, 218 aa, Artificial Sequence; identical to SEQ ID NO: 790
  Made in Lab - Exemplary Light Chain Sequence

SEQ ID NO: 819 - protein, 450 aa, Artificial Sequence; identical to SEQ ID NO: 815
  Made in Lab - Exemplary Heavy Chain Sequence

SEQ ID NO: 820 - protein, 218 aa, Artificial Sequence; identical to SEQ ID NO: 808
  Made in Lab - Exemplary Light Chain Sequence

SEQ ID NO: 821 - protein, 450 aa, Artificial Sequence; identical to SEQ ID NO: 815
  Made in Lab - Exemplary Heavy Chain Sequence

SEQ ID NO: 822 - protein, 218 aa, Artificial Sequence; identical to SEQ ID NO: 810
  Made in Lab - Exemplary Light Chain Sequence

SEQ ID NO: 823 - protein, 450 aa, Artificial Sequence; identical to SEQ ID NO: 815
  Made in Lab - Exemplary Heavy Chain Sequence

SEQ ID NO: 824 - protein, 218 aa, Artificial Sequence; identical to SEQ ID NO: 812
  Made in Lab - Exemplary Light Chain Sequence

SEQ ID NO: 825 - protein, 450 aa, Artificial Sequence; identical to SEQ ID NO: 815
  Made in Lab - Exemplary Heavy Chain Sequence

SEQ ID NO: 826 - protein, 218 aa, Artificial Sequence; identical to SEQ ID NO: 814
  Made in Lab - Exemplary Light Chain Sequence

SEQ ID NO: 827 - protein, 450 aa, Artificial Sequence
  Made in Lab - Exemplary Heavy Chain Sequence
QVQLVQSGAEVKKPGASVKVSCKASGYTFTEAIIHWVRQAPGQGLEWMGWIHPGSGSIKYAQKLQGRVTMTTDTSTSTAYMELRSLRSDDTAVYYCARHGGTGRGAMDYWGQGTLVTVSSASTKGPSVFPLAPSSKSTSGGTAALGCLVKDYFPEPVTVSWNSGALTSGVHTFPAVLQSSGLYSLSSVVTVPSSSLGTQTYICNVNHKPSNTKVDKKVEPKSCDKTHTCPPCPAPELLGGPSVFLFPPKPKDTLMISRTPEVTCVVVDVSHEDPEVKFNWYVDGVEVHNAKTKPREEQYNSTYRVVSVLTVLHQDWLNGKEYKCKVSNKALPAPIEKTISKAKGQPREPQVYTLPPSRDELTKNQVSLTCLVKGFYPSDIAVEWESNGQPENNYKTTPPVLDSDGSFFLYSKLTVDKSRWQQGNVFSCSVMHEALHNHYTQKSLSLSPGK

SEQ ID NO: 828 - protein, 218 aa, Artificial Sequence; identical to SEQ ID NO: 766
  Made in Lab - Exemplary Light Chain Sequence

SEQ ID NO: 829 - protein, 450 aa, Artificial Sequence; identical to SEQ ID NO: 827
  Made in Lab - Exemplary Heavy Chain Sequence

SEQ ID NO: 830 - protein, 218 aa, Artificial Sequence; identical to SEQ ID NO: 790
  Made in Lab - Exemplary Light Chain Sequence

SEQ ID NO: 831 - protein, 450 aa, Artificial Sequence; identical to SEQ ID NO: 827
  Made in Lab - Exemplary Heavy Chain Sequence

SEQ ID NO: 832 - protein, 218 aa, Artificial Sequence; identical to SEQ ID NO: 808
  Made in Lab - Exemplary Light Chain Sequence

SEQ ID NO: 833 - protein, 450 aa, Artificial Sequence
  Made in Lab - Exemplary Heavy Chain Sequence
QVQLVQSGAEVKKPGASVKVSCKASGYTFTENAIHWVRQAPGQGLEWMGWIHPGSGSIKYAQKLQGRVTMTTDTSTSTAYMELRSLRSDDTAVYYCARHGGTGRGAMDYWGQGTLVTVSSASTKGPSVFPLAPSSKSTSGGTAALGCLVKDYFPEPVTVSWNSGALTSGVHTFPAVLQSSGLYSLSSVVTVPSSSLGTQTYICNVNHKPSNTKVDKKVEPKSCDKTHTCPPCPAPELLGGPSVFLFPPKPKDTLMISRTPEVTCVVVDVSHEDPEVKFNWYVDGVEVHNAKTKPREEQYNSTYRVVSVLTVLHQDWLNGKEYKCKVSNKALPAPIEKTISKAKGQPREPQVYTLPPSRDELTKNQVSLTCLVKGFYPSDIAVEWESNGQPENNYKTTPPVLDSDGSFFLYSKLTVDKSRWQQGNVFSCSVMHEALHNHYTQKSLSLSPGK

SEQ ID NO: 834 - protein, 218 aa, Artificial Sequence; identical to SEQ ID NO: 766
  Made in Lab - Exemplary Light Chain Sequence

SEQ ID NO: 835 - protein, 450 aa, Artificial Sequence
  Made in Lab - Exemplary Heavy Chain Sequence
QVQLVQSGAEVKKPGASVKVSCKASGYTFTENIAHWVRQAPGQGLEWMGWIHPGSGSIKYAQKLQGRVTMTTDTSTSTAYMELRSLRSDDTAVYYCARHGGTGRGAMDYWGQGTLVTVSSASTKGPSVFPLAPSSKSTSGGTAALGCLVKDYFPEPVTVSWNSGALTSGVHTFPAVLQSSGLYSLSSVVTVPSSSLGTQTYICNVNHKPSNTKVDKKVEPKSCDKTHTCPPCPAPELLGGPSVFLFPPKPKDTLMISRTPEVTCVVVDVSHEDPEVKFNWYVDGVEVHNAKTKPREEQYNSTYRVVSVLTVLHQDWLNGKEYKCKVSNKALPAPIEKTISKAKGQPREPQVYTLPPSRDELTKNQVSLTCLVKGFYPSDIAVEWESNGQPENNYKTTPPVLDSDGSFFLYSKLTVDKSRWQQGNVFSCSVMHEALHNHYTQKSLSLSPGK

SEQ ID NO: 836 - protein, 218 aa, Artificial Sequence; identical to SEQ ID NO: 766
  Made in Lab - Exemplary Light Chain Sequence

SEQ ID NO: 837 - protein, 450 aa, Artificial Sequence
  Made in Lab - Exemplary Heavy Chain Sequence
QVQLVQSGAEVKKPGASVKVSCKASGYTFTENIIAWVRQAPGQGLEWMGWIHPGSGSIKYAQKLQGRVTMTTDTSTSTAYMELRSLRSDDTAVYYCARHGGTGRGAMDYWGQGTLVTVSSASTKGPSVFPLAPSSKSTSGGTAALGCLVKDYFPEPVTVSWNSGALTSGVHTFPAVLQSSGLYSLSSVVTVPSSSLGTQTYICNVNHKPSNTKVDKKVEPKSCDKTHTCPPCPAPELLGGPSVFLFPPKPKDTLMISRTPEVTCVVVDVSHEDPEVKFNWYVDGVEVHNAKTKPREEQYNSTYRVVSVLTVLHQDWLNGKEYKCKVSNKALPAPIEKTISKAKGQPREPQVYTLPPSRDELTKNQVSLTCLVKGFYPSDIAVEWESNGQPENNYKTTPPVLDSDGSFFLYSKLTVDKSRWQQGNVFSCSVMHEALHNHYTQKSLSLSPGK

SEQ ID NO: 838 - protein, 218 aa, Artificial Sequence; identical to SEQ ID NO: 766
  Made in Lab - Exemplary Light Chain Sequence

SEQ ID NO: 839 - protein, 450 aa, Artificial Sequence
  Made in Lab - Exemplary Heavy Chain Sequence
QVQLVQSGAEVKKPGASVKVSCKASGYTFTENIIHWVRQAPGQGLEWMGWIAPGSGSIKYAQKLQGRVTMTTDTSTSTAYMELRSLRSDDTAVYYCARHGGTGRGAMDYWGQGTLVTVSSASTKGPSVFPLAPSSKSTSGGTAALGCLVKDYFPEPVTVSWNSGALTSGVHTFPAVLQSSGLYSLSSVVTVPSSSLGTQTYICNVNHKPSNTKVDKKVEPKSCDKTHTCPPCPAPELLGGPSVFLFPPKPKDTLMISRTPEVTCVVVDVSHEDPEVKFNWYVDGVEVHNAKTKPREEQYNSTYRVVSVLTVLHQDWLNGKEYKCKVSNKALPAPIEKTISKAKGQPREPQVYTLPPSRDELTKNQVSLTCLVKGFYPSDIAVEWESNGQPENNYKTTPPVLDSDGSFFLYSKLTVDKSRWQQGNVFSCSVMHEALHNHYTQKSLSLSPGK

SEQ ID NO: 840 - protein, 218 aa, Artificial Sequence; identical to SEQ ID NO: 766
  Made in Lab - Exemplary Light Chain Sequence

SEQ ID NO: 841 - protein, 450 aa, Artificial Sequence
  Made in Lab - Exemplary Heavy Chain Sequence
QVQLVQSGAEVKKPGASVKVSCKASGYTFTENIIHWVRQAPGQGLEWMGWIHAGSGSIKYAQKLQGRVTMTTDTSTSTAYMELRSLRSDDTAVYYCARHGGTGRGAMDYWGQGTLVTVSSASTKGPSVFPLAPSSKSTSGGTAALGCLVKDYFPEPVTVSWNSGALTSGVHTFPAVLQSSGLYSLSSVVTVPSSSLGTQTYICNVNHKPSNTKVDKKVEPKSCDKTHTCPPCPAPELLGGPSVFLFPPKPKDTLMISRTPEVTCVVVDVSHEDPEVKFNWYVDGVEVHNAKTKPREEQYNSTYRVVSVLTVLHQDWLNGKEYKCKVSNKALPAPIEKTISKAKGQPREPQVYTLPPSRDELTKNQVSLTCLVKGFYPSDIAVEWESNGQPENNYKTTPPVLDSDGSFFLYSKLTVDKSRWQQGNVFSCSVMHEALHNHYTQKSLSLSPGK

SEQ ID NO: 842 - protein, 218 aa, Artificial Sequence; identical to SEQ ID NO: 766
  Made in Lab - Exemplary Light Chain Sequence

SEQ ID NO: 843 - protein, 450 aa, Artificial Sequence
  Made in Lab - Exemplary Heavy Chain Sequence
QVQLVQSGAEVKKPGASVKVSCKASGYTFTENIIHWVRQAPGQGLEWMGWIHPASGSIKYAQKLQGRVTMTTDTSTSTAYMELRSLRSDDTAVYYCARHGGTGRGAMDYWGQGTLVTVSSASTKGPSVFPLAPSSKSTSGGTAALGCLVKDYFPEPVTVSWNSGALTSGVHTFPAVLQSSGLYSLSSVVTVPSSSLGTQTYICNVNHKPSNTKVDKKVEPKSCDKTHTCPPCPAPELLGGPSVFLFPPKPKDTLMISRTPEVTCVVVDVSHEDPEVKFNWYVDGVEVHNAKTKPREEQYNSTYRVVSVLTVLHQDWLNGKEYKCKVSNKALPAPIEKTISKAKGQPREPQVYTLPPSRDELTKNQVSLTCLVKGFYPSDIAVEWESNGQPENNYKTTPPVLDSDGSFFLYSKLTVDKSRWQQGNVFSCSVMHEALHNHYTQKSLSLSPGK

SEQ ID NO: 844 - protein, 218 aa, Artificial Sequence; identical to SEQ ID NO: 766
  Made in Lab - Exemplary Light Chain Sequence

SEQ ID NO: 845 - protein, 450 aa, Artificial Sequence
  Made in Lab - Exemplary Heavy Chain Sequence
QVQLVQSGAEVKKPGASVKVSCKASGYTFTENIIHWVRQAPGQGLEWMGWIHPGAGSIKYAQKLQGRVTMTTDTSTSTAYMELRSLRSDDTAVYYCARHGGTGRGAMDYWGQGTLVTVSSASTKGPSVFPLAPSSKSTSGGTAALGCLVKDYFPEPVTVSWNSGALTSGVHTFPAVLQSSGLYSLSSVVTVPSSSLGTQTYICNVNHKPSNTKVDKKVEPKSCDKTHTCPPCPAPELLGGPSVFLFPPKPKDTLMISRTPEVTCVVVDVSHEDPEVKFNWYVDGVEVHNAKTKPREEQYNSTYRVVSVLTVLHQDWLNGKEYKCKVSNKALPAPIEKTISKAKGQPREPQVYTLPPSRDELTKNQVSLTCLVKGFYPSDIAVEWESNGQPENNYKTTPPVLDSDGSFFLYSKLTVDKSRWQQGNVFSCSVMHEALHNHYTQKSLSLSPGK

SEQ ID NO: 846 - protein, 218 aa, Artificial Sequence; identical to SEQ ID NO: 766
  Made in Lab - Exemplary Light Chain Sequence

SEQ ID NO: 847 - protein, 450 aa, Artificial Sequence
  Made in Lab - Exemplary Heavy Chain Sequence
QVQLVQSGAEVKKPGASVKVSCKASGYTFTENIIHWVRQAPGQGLEWMGWIHPGSASIKYAQKLQGRVTMTTDTSTSTAYMELRSLRSDDTAVYYCARHGGTGRGAMDYWGQGTLVTVSSASTKGPSVFPLAPSSKSTSGGTAALGCLVKDYFPEPVTVSWNSGALTSGVHTFPAVLQSSGLYSLSSVVTVPSSSLGTQTYICNVNHKPSNTKVDKKVEPKSCDKTHTCPPCPAPELLGGPSVFLFPPKPKDTLMISRTPEVTCVVVDVSHEDPEVKFNWYVDGVEVHNAKTKPREEQYNSTYRVVSVLTVLHQDWLNGKEYKCKVSNKALPAPIEKTISKAKGQPREPQVYTLPPSRDELTKNQVSLTCLVKGFYPSDIAVEWESNGQPENNYKTTPPVLDSDGSFFLYSKLTVDKSRWQQGNVFSCSVMHEALHNHYTQKSLSLSPGK

SEQ ID NO: 848 - protein, 218 aa, Artificial Sequence; identical to SEQ ID NO: 766
  Made in Lab - Exemplary Light Chain Sequence

SEQ ID NO: 849 - protein, 450 aa, Artificial Sequence
  Made in Lab - Exemplary Heavy Chain Sequence
QVQLVQSGAEVKKPGASVKVSCKASGYTFTENIIHWVRQAPGQGLEWMGWIHPGSGAIKYAQKLQGRVTMTTDTSTSTAYMELRSLRSDDTAVYYCARHGGTGRGAMDYWGQGTLVTVSSASTKGPSVFPLAPSSKSTSGGTAALGCLVKDYFPEPVTVSWNSGALTSGVHTFPAVLQSSGLYSLSSVVTVPSSSLGTQTYICNVNHKPSNTKVDKKVEPKSCDKTHTCPPCPAPELLGGPSVFLFPPKPKDTLMISRTPEVTCVVVDVSHEDPEVKFNWYVDGVEVHNAKTKPREEQYNSTYRVVSVLTVLHQDWLNGKEYKCKVSNKALPAPIEKTISKAKGQPREPQVYTLPPSRDELTKNQVSLTCLVKGFYPSDIAVEWESNGQPENNYKTTPPVLDSDGSFFLYSKLTVDKSRWQQGNVFSCSVMHEALHNHYTQKSLSLSPGK

SEQ ID NO: 850 - protein, 218 aa, Artificial Sequence; identical to SEQ ID NO: 766
  Made in Lab - Exemplary Light Chain Sequence

SEQ ID NO: 851 - protein, 450 aa, Artificial Sequence; identical to SEQ ID NO: 849
  Made in Lab - Exemplary Heavy Chain Sequence

SEQ ID NO: 852 - protein, 218 aa, Artificial Sequence; identical to SEQ ID NO: 810
  Made in Lab - Exemplary Light Chain Sequence

SEQ ID NO: 853 - protein, 450 aa, Artificial Sequence; identical to SEQ ID NO: 849
  Made in Lab - Exemplary Heavy Chain Sequence

SEQ ID NO: 854 - protein, 218 aa, Artificial Sequence; identical to SEQ ID NO: 812
  Made in Lab - Exemplary Light Chain Sequence

SEQ ID NO: 855 - protein, 450 aa, Artificial Sequence; identical to SEQ ID NO: 849
  Made in Lab - Exemplary Heavy Chain Sequence

SEQ ID NO: 856 - protein, 218 aa, Artificial Sequence; identical to SEQ ID NO: 814
  Made in Lab - Exemplary Light Chain Sequence

SEQ ID NO: 857 - protein, 450 aa, Artificial Sequence; identical to SEQ ID NO: 847
  Made in Lab - Exemplary Heavy Chain Sequence

SEQ ID NO: 858 - protein, 218 aa, Artificial Sequence; identical to SEQ ID NO: 766
  Made in Lab - Exemplary Light Chain Sequence

SEQ ID NO: 859 - protein, 450 aa, Artificial Sequence
  Made in Lab - Exemplary Heavy Chain Sequence
QVQLVQSGAEVKKPGASVKVSCKASGYTFTENIIHWVRQAPGQGLEWMGWIHPGSGSIAYAQKLQGRVTMTTDTSTSTAYMELRSLRSDDTAVYYCARHGGTGRGAMDYWGQGTLVTVSSASTKGPSVFPLAPSSKSTSGGTAALGCLVKDYFPEPVTVSWNSGALTSGVHTFPAVLQSSGLYSLSSVVTVPSSSLGTQTYICNVNHKPSNTKVDKKVEPKSCDKTHTCPPCPAPELLGGPSVFLFPPKPKDTLMISRTPEVTCVVVDVSHEDPEVKFNWYVDGVEVHNAKTKPREEQYNSTYRVVSVLTVLHQDWLNGKEYKCKVSNKALPAPIEKTISKAKGQPREPQVYTLPPSRDELTKNQVSLTCLVKGFYPSDIAVEWESNGQPENNYKTTPPVLDSDGSFFLYSKLTVDKSRWQQGNVFSCSVMHEALHNHYTQKSLSLSPGK

SEQ ID NO: 860 - protein, 218 aa, Artificial Sequence; identical to SEQ ID NO: 766
  Made in Lab - Exemplary Light Chain Sequence

SEQ ID NO: 861 - protein, 450 aa, Artificial Sequence
  Made in Lab - Exemplary Heavy Chain Sequence
QVQLVQSGAEVKKPGASVKVSCKASGYTFTENIIHWVRQAPGQGLEWMGWIHPGSGSIKYAQKLQGRVTMTTDTSTSTAYMELRSLRSDDTAVYYCARAGGTGRGAMDYWGQGTLVTVSSASTKGPSVFPLAPSSKSTSGGTAALGCLVKDYFPEPVTVSWNSGALTSGVHTFPAVLQSSGLYSLSSVVTVPSSSLGTQTYICNVNHKPSNTKVDKKVEPKSCDKTHTCPPCPAPELLGGPSVFLFPPKPKDTLMISRTPEVTCVVVDVSHEDPEVKFNWYVDGVEVHNAKTKPREEQYNSTYRVVSVLTVLHQDWLNGKEYKCKVSNKALPAPIEKTISKAKGQPREPQVYTLPPSRDELTKNQVSLTCLVKGFYPSDIAVEWESNGQPENNYKTTPPVLDSDGSFFLYSKLTVDKSRWQQGNVFSCSVMHEALHNHYTQKSLSLSPGK

SEQ ID NO: 862 - protein, 218 aa, Artificial Sequence; identical to SEQ ID NO: 766
  Made in Lab - Exemplary Light Chain Sequence

SEQ ID NO: 863 - protein, 450 aa, Artificial Sequence
  Made in Lab - Exemplary Heavy Chain Sequence
QVQLVQSGAEVKKPGASVKVSCKASGYTFTENIIHWVRQAPGQGLEWMGWIHPGSGSIKYAQKLQGRVTMTTDTSTSTAYMELRSLRSDDTAVYYCARHAGTGRGAMDYWGQGTLVTVSSASTKGPSVFPLAPSSKSTSGGTAALGCLVKDYFPEPVTVSWNSGALTSGVHTFPAVLQSSGLYSLSSVVTVPSSSLGTQTYICNVNHKPSNTKVDKKVEPKSCDKTHTCPPCPAPELLGGPSVFLFPPKPKDTLMISRTPEVTCVVVDVSHEDPEVKFNWYVDGVEVHNAKTKPREEQYNSTYRVVSVLTVLHQDWLNGKEYKCKVSNKALPAPIEKTISKAKGQPREPQVYTLPPSRDELTKNQVSLTCLVKGFYPSDIAVEWESNGQPENNYKTTPPVLDSDGSFFLYSKLTVDKSRWQQGNVFSCSVMHEALHNHYTQKSLSLSPGK

SEQ ID NO: 864 - protein, 218 aa, Artificial Sequence; identical to SEQ ID NO: 766
  Made in Lab - Exemplary Light Chain Sequence

SEQ ID NO: 865 - protein, 450 aa, Artificial Sequence
  Made in Lab - Exemplary Heavy Chain Sequence
QVQLVQSGAEVKKPGASVKVSCKASGYTFTENIIHWVRQAPGQGLEWMGWIHPGSGSIKYAQKLQGRVTMTTDTSTSTAYMELRSLRSDDTAVYYCARHGATGRGAMDYWGQGTLVTVSSASTKGPSVFPLAPSSKSTSGGTAALGCLVKDYFPEPVTVSWNSGALTSGVHTFPAVLQSSGLYSLSSVVTVPSSSLGTQTYICNVNHKPSNTKVDKKVEPKSCDKTHTCPPCPAPELLGGPSVFLFPPKPKDTLMISRTPEVTCVVVDVSHEDPEVKFNWYVDGVEVHNAKTKPREEQYNSTYRVVSVLTVLHQDWLNGKEYKCKVSNKALPAPIEKTISKAKGQPREPQVYTLPPSRDELTKNQVSLTCLVKGFYPSDIAVEWESNGQPENNYKTTPPVLDSDGSFFLYSKLTVDKSRWQQGNVFSCSVMHEALHNHYTQKSLSLSPGK

SEQ ID NO: 866 - protein, 218 aa, Artificial Sequence; identical to SEQ ID NO: 766
  Made in Lab - Exemplary Light Chain Sequence

SEQ ID NO: 867 - protein, 450 aa, Artificial Sequence
  Made in Lab - Exemplary Heavy Chain Sequence
QVQLVQSGAEVKKPGASVKVSCKASGYTFTENIIHWVRQAPGQGLEWMGWIHPGSGSIKYAQKLQGRVTMTTDTSTSTAYMELRSLRSDDTAVYYCARHGGAGRGAMDYWGQGTLVTVSSASTKGPSVFPLAPSSKSTSGGTAALGCLVKDYFPEPVTVSWNSGALTSGVHTFPAVLQSSGLYSLSSVVTVPSSSLGTQTYICNVNHKPSNTKVDKKVEPKSCDKTHTCPPCPAPELLGGPSVFLFPPKPKDTLMISRTPEVTCVVVDVSHEDPEVKFNWYVDGVEVHNAKTKPREEQYNSTYRVVSVLTVLHQDWLNGKEYKCKVSNKALPAPIEKTISKAKGQPREPQVYTLPPSRDELTKNQVSLTCLVKGFYPSDIAVEWESNGQPENNYKTTPPVLDSDGSFFLYSKLTVDKSRWQQGNVFSCSVMHEALHNHYTQKSLSLSPGK

SEQ ID NO: 868 - protein, 218 aa, Artificial Sequence; identical to SEQ ID NO: 766
  Made in Lab - Exemplary Light Chain Sequence

SEQ ID NO: 869 - protein, 450 aa, Artificial Sequence
  Made in Lab - Exemplary Heavy Chain Sequence
QVQLVQSGAEVKKPGASVKVSCKASGYTFTENIIHWVRQAPGQGLEWMGWIHPGSGSIKYAQKLQGRVTMTTDTSTSTAYMELRSLRSDDTAVYYCARHGGTARGAMDYWGQGTLVTVSSASTKGPSVFPLAPSSKSTSGGTAALGCLVKDYFPEPVTVSWNSGALTSGVHTFPAVLQSSGLYSLSSVVTVPSSSLGTQTYICNVNHKPSNTKVDKKVEPKSCDKTHTCPPCPAPELLGGPSVFLFPPKPKDTLMISRTPEVTCVVVDVSHEDPEVKFNWYVDGVEVHNAKTKPREEQYNSTYRVVSVLTVLHQDWLNGKEYKCKVSNKALPAPIEKTISKAKGQPREPQVYTLPPSRDELTKNQVSLTCLVKGFYPSDIAVEWESNGQPENNYKTTPPVLDSDGSFFLYSKLTVDKSRWQQGNVFSCSVMHEALHNHYTQKSLSLSPGK

SEQ ID NO: 870 - protein, 218 aa, Artificial Sequence; identical to SEQ ID NO: 766
  Made in Lab - Exemplary Light Chain Sequence

SEQ ID NO: 871 - protein, 450 aa, Artificial Sequence
  Made in Lab - Exemplary Heavy Chain Sequence
QVQLVQSGAEVKKPGASVKVSCKASGYTFTENIIHWVRQAPGQGLEWMGWIHPGSGSIKYAQKLQGRVTMTTDTSTSTAYMELRSLRSDDTAVYYCARHGGTGAGAMDYWGQGTLVTVSSASTKGPSVFPLAPSSKSTSGGTAALGCLVKDYFPEPVTVSWNSGALTSGVHTFPAVLQSSGLYSLSSVVTVPSSSLGTQTYICNVNHKPSNTKVDKKVEPKSCDKTHTCPPCPAPELLGGPSVFLFPPKPKDTLMISRTPEVTCVVVDVSHEDPEVKFNWYVDGVEVHNAKTKPREEQYNSTYRVVSVLTVLHQDWLNGKEYKCKVSNKALPAPIEKTISKAKGQPREPQVYTLPPSRDELTKNQVSLTCLVKGFYPSDIAVEWESNGQPENNYKTTPPVLDSDGSFFLYSKLTVDKSRWQQGNVFSCSVMHEALHNHYTQKSLSLSPGK

SEQ ID NO: 872 - protein, 218 aa, Artificial Sequence; identical to SEQ ID NO: 766
  Made in Lab - Exemplary Light Chain Sequence

SEQ ID NO: 873 - protein, 450 aa, Artificial Sequence
  Made in Lab - Exemplary Heavy Chain Sequence
QVQLVQSGAEVKKPGASVKVSCKASGYTFTENIIHWVRQAPGQGLEWMGWIHPGSGSIKYAQKLQGRVTMTTDTSTSTAYMELRSLRSDDTAVYYCARHGGTGRAAMDYWGQGTLVTVSSASTKGPSVFPLAPSSKSTSGGTAALGCLVKDYFPEPVTVSWNSGALTSGVHTFPAVLQSSGLYSLSSVVTVPSSSLGTQTYICNVNHKPSNTKVDKKVEPKSCDKTHTCPPCPAPELLGGPSVFLFPPKPKDTLMISRTPEVTCVVVDVSHEDPEVKFNWYVDGVEVHNAKTKPREEQYNSTYRVVSVLTVLHQDWLNGKEYKCKVSNKALPAPIEKTISKAKGQPREPQVYTLPPSRDELTKNQVSLTCLVKGFYPSDIAVEWESNGQPENNYKTTPPVLDSDGSFFLYSKLTVDKSRWQQGNVFSCSVMHEALHNHYTQKSLSLSPGK

SEQ ID NO: 874 - protein, 218 aa, Artificial Sequence; identical to SEQ ID NO: 766
  Made in Lab - Exemplary Light Chain Sequence

SEQ ID NO: 875 - protein, 450 aa, Artificial Sequence
  Made in Lab - Exemplary Heavy Chain Sequence
QVQLVQSGAEVKKPGASVKVSCKASGYTFTANIIHWVRQAPGQGLEWMGWIHPGSGAIKYAQKLQGRVTMTTDTSTSTAYMELRSLRSDDTAVYYCARHGGTGRGAMDYWGQGTLVTVSSASTKGPSVFPLAPSSKSTSGGTAALGCLVKDYFPEPVTVSWNSGALTSGVHTFPAVLQSSGLYSLSSVVTVPSSSLGTQTYICNVNHKPSNTKVDKKVEPKSCDKTHTCPPCPAPELLGGPSVFLFPPKPKDTLMISRTPEVTCVVVDVSHEDPEVKFNWYVDGVEVHNAKTKPREEQYNSTYRVVSVLTVLHQDWLNGKEYKCKVSNKALPAPIEKTISKAKGQPREPQVYTLPPSRDELTKNQVSLTCLVKGFYPSDIAVEWESNGQPENNYKTTPPVLDSDGSFFLYSKLTVDKSRWQQGNVFSCSVMHEALHNHYTQKSLSLSPGK

SEQ ID NO: 876 - protein, 218 aa, Artificial Sequence; identical to SEQ ID NO: 766
  Made in Lab - Exemplary Light Chain Sequence

SEQ ID NO: 877 - protein, 450 aa, Artificial Sequence; identical to SEQ ID NO: 875
  Made in Lab - Exemplary Heavy Chain Sequence

SEQ ID NO: 878 - protein, 218 aa, Artificial Sequence; identical to SEQ ID NO: 790
  Made in Lab - Exemplary Light Chain Sequence

SEQ ID NO: 879 - protein, 450 aa, Artificial Sequence; identical to SEQ ID NO: 875
  Made in Lab - Exemplary Heavy Chain Sequence

SEQ ID NO: 880 - protein, 218 aa, Artificial Sequence; identical to SEQ ID NO: 808
  Made in Lab - Exemplary Light Chain Sequence

SEQ ID NO: 881 - protein, 450 aa, Artificial Sequence; identical to SEQ ID NO: 875
  Made in Lab - Exemplary Heavy Chain Sequence

SEQ ID NO: 882 - protein, 218 aa, Artificial Sequence; identical to SEQ ID NO: 810
  Made in Lab - Exemplary Light Chain Sequence

SEQ ID NO: 883 - protein, 450 aa, Artificial Sequence; identical to SEQ ID NO: 875
  Made in Lab - Exemplary Heavy Chain Sequence

SEQ ID NO: 884 - protein, 218 aa, Artificial Sequence; identical to SEQ ID NO: 812
  Made in Lab - Exemplary Light Chain Sequence

SEQ ID NO: 885 - protein, 450 aa, Artificial Sequence; identical to SEQ ID NO: 875
  Made in Lab - Exemplary Heavy Chain Sequence

SEQ ID NO: 886 - protein, 218 aa, Artificial Sequence; identical to SEQ ID NO: 814
  Made in Lab - Exemplary Light Chain Sequence

SEQ ID NO: 887 - protein, 450 aa, Artificial Sequence
  Made in Lab - Exemplary Heavy Chain Sequence
QVQLVQSGAEVKKPGASVKVSCKASGYTFTSNIIHWVRQAPGQGLEWMGWIHPGSGAIKYAQKLQGRVTMTTDTSTSTAYMELRSLRSDDTAVYYCARHGGTGRGAMDYWGQGTLVTVSSASTKGPSVFPLAPSSKSTSGGTAALGCLVKDYFPEPVTVSWNSGALTSGVHTFPAVLQSSGLYSLSSVVTVPSSSLGTQTYICNVNHKPSNTKVDKKVEPKSCDKTHTCPPCPAPELLGGPSVFLFPPKPKDTLMISRTPEVTCVVVDVSHEDPEVKFNWYVDGVEVHNAKTKPREEQYNSTYRVVSVLTVLHQDWLNGKEYKCKVSNKALPAPIEKTISKAKGQPREPQVYTLPPSRDELTKNQVSLTCLVKGFYPSDIAVEWESNGQPENNYKTTPPVLDSDGSFFLYSKLTVDKSRWQQGNVFSCSVMHEALHNHYTQKSLSLSPGK

SEQ ID NO: 888 - protein, 218 aa, Artificial Sequence; identical to SEQ ID NO: 766
  Made in Lab - Exemplary Light Chain Sequence

SEQ ID NO: 889 - protein, 450 aa, Artificial Sequence; identical to SEQ ID NO: 887
  Made in Lab - Exemplary Heavy Chain Sequence

SEQ ID NO: 890 - protein, 218 aa, Artificial Sequence; identical to SEQ ID NO: 790
  Made in Lab - Exemplary Light Chain Sequence

SEQ ID NO: 891 - protein, 450 aa, Artificial Sequence; identical to SEQ ID NO: 887
  Made in Lab - Exemplary Heavy Chain Sequence

SEQ ID NO: 892 - protein, 218 aa, Artificial Sequence; identical to SEQ ID NO: 808
  Made in Lab - Exemplary Light Chain Sequence

SEQ ID NO: 893 - protein, 450 aa, Artificial Sequence; identical to SEQ ID NO: 887
  Made in Lab - Exemplary Heavy Chain Sequence

SEQ ID NO: 894 - protein, 218 aa, Artificial Sequence; identical to SEQ ID NO: 810
  Made in Lab - Exemplary Light Chain Sequence

SEQ ID NO: 895 - protein, 450 aa, Artificial Sequence; identical to SEQ ID NO: 887
  Made in Lab - Exemplary Heavy Chain Sequence

SEQ ID NO: 896 - protein, 218 aa, Artificial Sequence; identical to SEQ ID NO: 812
  Made in Lab - Exemplary Light Chain Sequence

SEQ ID NO: 897 - protein, 450 aa, Artificial Sequence; identical to SEQ ID NO: 887
  Made in Lab - Exemplary Heavy Chain Sequence

SEQ ID NO: 898 - protein, 218 aa, Artificial Sequence; identical to SEQ ID NO: 814
  Made in Lab - Exemplary Light Chain Sequence

SEQ ID NO: 899 - protein, 450 aa, Artificial Sequence
  Made in Lab - Exemplary Heavy Chain Sequence
QVQLVQSGAEVKKPGASVKVSCKASGYTFTANIIHWVRQAPGQGLEWMGWIHPGSGSIKYAQKLQGRVTMTTDTSTSTAYMELRSLRSDDTAVYYCARHGGTGRGAMDYWGQGTLVTVSSASTKGPSVFPLAPSSKSTSGGTAALGCLVKDYFPEPVTVSWNSGALTSGVHTFPAVLQSSGLYSLSSVVTVPSSSLGTQTYICNVNHKPSNTKVDKKVEPKSCDKTHTCPPCPAPELLGGPSVFLLPPKPKDTLMISRTPEVTCVVVDVSHEDPEVKFNWYVDGVEVHNAKTKPPEEQYNSTLRVVSVLTVLHQDWLNGKEYKCKVSNKALPAPIEKTISKAKGQPREPQVYTLPPSRDELTKNQVSLTCLVKGFYPSDIAVEWESNGQPENNYKTTPPVLDSDGSFFLYSKLTVDKSRWQQGNVFSCSVMHEALHNHYTQKSLSLSPGK

SEQ ID NO: 900 - protein, 218 aa, Artificial Sequence; identical to SEQ ID NO: 766
  Made in Lab - Exemplary Light Chain Sequence

SEQ ID NO: 901 - protein, 450 aa, Artificial Sequence; identical to SEQ ID NO: 899
  Made in Lab - Exemplary Heavy Chain Sequence

SEQ ID NO: 902 - protein, 218 aa, Artificial Sequence; identical to SEQ ID NO: 808
  Made in Lab - Exemplary Light Chain Sequence

SEQ ID NO: 903 - protein, 450 aa, Artificial Sequence
  Made in Lab - Exemplary Heavy Chain Sequence
QVQLVQSGAEVKKPGASVKVSCKASGYTFTENAIHWVRQAPGQGLEWMGWIHPGSGSIKYAQKLQGRVTMTTDTSTSTAYMELRSLRSDDTAVYYCARHGGTGRGAMDYWGQGTLVTVSSASTKGPSVFPLAPSSKSTSGGTAALGCLVKDYFPEPVTVSWNSGALTSGVHTFPAVLQSSGLYSLSSVVTVPSSSLGTQTYICNVNHKPSNTKVDKKVEPKSCDKTHTCPPCPAPELLGGPSVFLLPPKPKDTLMISRTPEVTCVVVDVSHEDPEVKFNWYVDGVEVHNAKTKPPEEQYNSTLRVVSVLTVLHQDWLNGKEYKCKVSNKALPAPIEKTISKAKGQPREPQVYTLPPSRDELTKNQVSLTCLVKGFYPSDIAVEWESNGQPENNYKTTPPVLDSDGSFFLYSKLTVDKSRWQQGNVFSCSVMHEALHNHYTQKSLSLSPGK

SEQ ID NO: 904 - protein, 218 aa, Artificial Sequence; identical to SEQ ID NO: 766
  Made in Lab - Exemplary Light Chain Sequence

SEQ ID NO: 905 - protein, 450 aa, Artificial Sequence
  Made in Lab - Exemplary Heavy Chain Sequence
QVQLVQSGAEVKKPGASVKVSCKASGYTFTENIIHWVRQAPGQGLEWMGWIHPGSGAIKYAQKLQGRVTMTTDTSTSTAYMELRSLRSDDTAVYYCARHGGTGRGAMDYWGQGTLVTVSSASTKGPSVFPLAPSSKSTSGGTAALGCLVKDYFPEPVTVSWNSGALTSGVHTFPAVLQSSGLYSLSSVVTVPSSSLGTQTYICNVNHKPSNTKVDKKVEPKSCDKTHTCPPCPAPELLGGPSVFLLPPKPKDTLMISRTPEVTCVVVDVSHEDPEVKFNWYVDGVEVHNAKTKPPEEQYNSTLRVVSVLTVLHQDWLNGKEYKCKVSNKALPAPIEKTISKAKGQPREPQVYTLPPSRDELTKNQVSLTCLVKGFYPSDIAVEWESNGQPENNYKTTPPVLDSDGSFFLYSKLTVDKSRWQQGNVFSCSVMHEALHNHYTQKSLSLSPGK

SEQ ID NO: 906 - protein, 218 aa, Artificial Sequence; identical to SEQ ID NO: 766
  Made in Lab - Exemplary Light Chain Sequence

SEQ ID NO: 907 - protein, 450 aa, Artificial Sequence; identical to SEQ ID NO: 905
  Made in Lab - Exemplary Heavy Chain Sequence

SEQ ID NO: 908 - protein, 218 aa, Artificial Sequence; identical to SEQ ID NO: 810
  Made in Lab - Exemplary Light Chain Sequence

SEQ ID NO: 909 - protein, 450 aa, Artificial Sequence; identical to SEQ ID NO: 905
  Made in Lab - Exemplary Heavy Chain Sequence

SEQ ID NO: 910 - protein, 218 aa, Artificial Sequence; identical to SEQ ID NO: 812
  Made in Lab - Exemplary Light Chain Sequence

SEQ ID NO: 911 - protein, 450 aa, Artificial Sequence
  Made in Lab - Exemplary Heavy Chain Sequence
QVQLVQSGAEVKKPGASVKVSCKASGYTFTENIIHWVRQAPGQGLEWMGWIHPGSGSIKYAQKLQGRVTMTTDTSTSTAYMELRSLRSDDTAVYYCARHGGTGRAAMDYWGQGTLVTVSSASTKGPSVFPLAPSSKSTSGGTAALGCLVKDYFPEPVTVSWNSGALTSGVHTFPAVLQSSGLYSLSSVVTVPSSSLGTQTYICNVNHKPSNTKVDKKVEPKSCDKTHTCPPCPAPELLGGPSVFLLPPKPKDTLMISRTPEVTCVVVDVSHEDPEVKFNWYVDGVEVHNAKTKPPEEQYNSTLRVVSVLTVLHQDWLNGKEYKCKVSNKALPAPIEKTISKAKGQPREPQVYTLPPSRDELTKNQVSLTCLVKGFYPSDIAVEWESNGQPENNYKTTPPVLDSDGSFFLYSKLTVDKSRWQQGNVFSCSVMHEALHNHYTQKSLSLSPGK

SEQ ID NO: 912 - protein, 218 aa, Artificial Sequence; identical to SEQ ID NO: 766
  Made in Lab - Exemplary Light Chain Sequence

SEQ ID NO: 913 - protein, 450 aa, Artificial Sequence
  Made in Lab - Exemplary Heavy Chain Sequence
QVQLVQSGAEVKKPGASVKVSCKASGYTFTENIIHWVRQAPGQGLEWMGWIHPGSGSIKYAQKLQGRVTMTTDTSTSTAYMELRSLRSDDTAVYYCARHGGTGRAAMDYWGQGTLVTVSSASTKGPSVFPLAPSSKSTSGGTAALGCLVKDYFPEPVTVSWNSGALTSGVHTFPAVLQSSGLYSLSSVVTVPSSSLGTQTYICNVNHKPSNTKVDKKVEPKSCDKTHTCPPCPAPELVGGPSVFLLPPKPKDTLMISRTPEVTCVVVDVSHEDPEVKFNWYVDGVEVHNAKTKPPEEQYNSTLRVVSVLTVLHQDWLNGKEYKCKVSNKALPAPIEKTISKAKGQPREPQVYTLPPSRDELTKNQVSLTCLVKGFYPSDIAVEWESNGQPENNYKTTPLVLDSDGSFFLYSKLTVDKSRWQQGNVFSCSVMHEALHNHYTQKSLSLSPGK

SEQ ID NO: 914 - protein, 218 aa, Artificial Sequence; identical to SEQ ID NO: 766
  Made in Lab - Exemplary Light Chain Sequence

SEQ ID NO: 915 - protein, 450 aa, Artificial Sequence
  Made in Lab - Exemplary Heavy Chain Sequence
QVQLVQSGAEVKKPGASVKVSCKASGYTFTENIIHWVRQAPGQGLEWMGWIHPGSGSIKYAQKLQGRVTMTTDTSTSTAYMELRSLRSDDTAVYYCARHGGTGRGAMDYWGQGTLVTVSSASTKGPSVFPLAPSSKSTSGGTAALGCLVKDYFPEPVTVSWNSGALTSGVHTFPAVLQSSGLYSLSSVVTVPSSSLGTQTYICNVNHKPSNTKVDKKVEPKSCDKTHTCPPCPAPELLGGPSVFLLPPKPKDTLMISRTPEVTCVVVDVSHEDPEVKFNWYVDGVEVHNAKTKPPEEQYNSTLRVVSVLTVLHQDWLNGKEYKCKVSNKALPAPIEKTISKAKGQPREPQVYTLPPSRDELTKNQVSLTCLVKGFYPSDIAVEWESNGQPENNYKTTPPVLDSDGSFFLYSKLTVDKSRWQQGNVFSCSVMHEALHNHYTQKSLSLSPGK

SEQ ID NO: 916 - protein, 218 aa, Artificial Sequence; identical to SEQ ID NO: 782
  Made in Lab - Exemplary Light Chain Sequence

SEQ ID NO: 917 - protein, 450 aa, Artificial Sequence; identical to SEQ ID NO: 915
  Made in Lab - Exemplary Heavy Chain Sequence

SEQ ID NO: 918 - protein, 218 aa, Artificial Sequence; identical to SEQ ID NO: 790
  Made in Lab - Exemplary Light Chain Sequence

SEQ ID NO: 919 - protein, 450 aa, Artificial Sequence; identical to SEQ ID NO: 915
  Made in Lab - Exemplary Heavy Chain Sequence

SEQ ID NO: 920 - protein, 218 aa, Artificial Sequence; identical to SEQ ID NO: 802
  Made in Lab - Exemplary Light Chain Sequence

SEQ ID NO: 921 - protein, 450 aa, Artificial Sequence; identical to SEQ ID NO: 915
  Made in Lab - Exemplary Heavy Chain Sequence

SEQ ID NO: 922 - protein, 218 aa, Artificial Sequence; identical to SEQ ID NO: 808
  Made in Lab - Exemplary Light Chain Sequence

SEQ ID NO: 923 - protein, 450 aa, Artificial Sequence
  Made in Lab - Exemplary Heavy Chain Sequence
QVQLVQSGAEVKKPGASVKVSCKASGYTFTSNIIHWVRQAPGQGLEWMGWIHPGSGAIKYAQKLQGRVTMTTDTSTSTAYMELRSLRSDDTAVYYCARHGGTGRGAMDYWGQGTLVTVSSASTKGPSVFPLAPSSKSTSGGTAALGCLVKDYFPEPVTVSWNSGALTSGVHTFPAVLQSSGLYSLSSVVTVPSSSLGTQTYICNVNHKPSNTKVDKKVEPKSCDKTHTCPPCPAPELLGGPSVFLLPPKPKDTLMISRTPEVTCVVVDVSHEDPEVKFNWYVDGVEVHNAKTKPPEEQYNSTLRVVSVLTVLHQDWLNGKEYKCKVSNKALPAPIEKTISKAKGQPREPQVYTLPPSRDELTKNQVSLTCLVKGFYPSDIAVEWESNGQPENNYKTTPPVLDSDGSFFLYSKLTVDKSRWQQGNVFSCSVMHEALHNHYTQKSLSLSPGK

SEQ ID NO: 924 - protein, 218 aa, Artificial Sequence; identical to SEQ ID NO: 766
  Made in Lab - Exemplary Light Chain Sequence

SEQ ID NO: 925 - protein, 450 aa, Artificial Sequence; identical to SEQ ID NO: 923
  Made in Lab - Exemplary Heavy Chain Sequence

SEQ ID NO: 926 - protein, 218 aa, Artificial Sequence; identical to SEQ ID NO: 812
  Made in Lab - Exemplary Light Chain Sequence

SEQ ID NO: 927 - protein, 450 aa, Artificial Sequence
  Made in Lab - Exemplary Heavy Chain Sequence
QVQLVQSGAEVKKPGASVKVSCKASGYTFTANIIHWVRQAPGQGLEWMGWIHPGSGAIKYAQKLQGRVTMTTDTSTSTAYMELRSLRSDDTAVYYCARHGGTGRGAMDYWGQGTLVTVSSASTKGPSVFPLAPSSKSTSGGTAALGCLVKDYFPEPVTVSWNSGALTSGVHTFPAVLQSSGLYSLSSVVTVPSSSLGTQTYICNVNHKPSNTKVDKKVEPKSCDKTHTCPPCPAPELLGGPSVFLLPPKPKDTLMISRTPEVTCVVVDVSHEDPEVKFNWYVDGVEVHNAKTKPPEEQYNSTLRVVSVLTVLHQDWLNGKEYKCKVSNKALPAPIEKTISKAKGQPREPQVYTLPPSRDELTKNQVSLTCLVKGFYPSDIAVEWESNGQPENNYKTTPPVLDSDGSFFLYSKLTVDKSRWQQGNVFSCSVMHEALHNHYTQKSLSLSPGK

SEQ ID NO: 928 - protein, 218 aa, Artificial Sequence; identical to SEQ ID NO: 810
  Made in Lab - Exemplary Light Chain Sequence

SEQ ID NO: 929 - protein, 450 aa, Artificial Sequence
  Made in Lab - Exemplary Heavy Chain Sequence
QVQLVQSGAEVKKPGASVKVSCKASGYTFTSNIIHWVRQAPGQGLEWMGWIHPGSGAIKYAQKLQGRVTMTTDTSTSTAYMELRSLRSDDTAVYYCARHGGTGRGAMDYWGQGTLVTVSSASTKGPSVFPLAPSSKSTSGGTAALGCLVKDYFPEPVTVSWNSGALTSGVHTFPAVLQSSGLYSLSSVVTVPSSSLGTQTYICNVNHKPSNTKVDKKVEPKSCDKTHTCPPCPAPELVGGPSVFLLPPKPKDTLMISRTPEVTCVVVDVSHEDPEVKFNWYVDGVEVHNAKTKPPEEQYNSTLRVVSVLTVLHQDWLNGKEYKCKVSNKALPAPIEKTISKAKGQPREPQVYTLPPSRDELTKNQVSLTCLVKGFYPSDIAVEWESNGQPENNYKTTPLVLDSDGSFFLYSKLTVDKSRWQQGNVFSCSVMHEALHNHYTQKSLSLSPGK

SEQ ID NO: 930 - protein, 218 aa, Artificial Sequence; identical to SEQ ID NO: 812
  Made in Lab - Exemplary Light Chain Sequence

SEQ ID NO: 931 - protein, 450 aa, Artificial Sequence
  Made in Lab - Exemplary Heavy Chain Sequence
QVQLVQSGAEVKKPGASVKVSCKASGYTFTSNIIHWVRQAPGQGLEWMGWFHPGSGAIKYAQKLQGRVTMTTDTSTSTAYMELRSLRSDDTAVYYCARHGGTGRGAMDYWGQGTLVTVSSASTKGPSVFPLAPSSKSTSGGTAALGCLVKDYFPEPVTVSWNSGALTSGVHTFPAVLQSSGLYSLSSVVTVPSSSLGTQTYICNVNHKPSNTKVDKKVEPKSCDKTHTCPPCPAPELLGGPSVFLFPPKPKDTLMISRTPEVTCVVVDVSHEDPEVKFNWYVDGVEVHNAKTKPREEQYNSTYRVVSVLTVLHQDWLNGKEYKCKVSNKALPAPIEKTISKAKGQPREPQVYTLPPSRDELTKNQVSLTCLVKGFYPSDIAVEWESNGQPENNYKTTPPVLDSDGSFFLYSKLTVDKSRWQQGNVFSCSVMHEALHNHYTQKSLSLSPGK

SEQ ID NO: 932 - protein, 218 aa, Artificial Sequence; identical to SEQ ID NO: 766
  Made in Lab - Exemplary Light Chain Sequence

SEQ ID NO: 933 - protein, 450 aa, Artificial Sequence
  Made in Lab - Exemplary Heavy Chain Sequence
QVQLVQSGAEVKKPGASVKVSCKASGYTFTDNIIHWVRQAPGQGLEWMGWIHPGSGAIKYAQKLQGRVTMTTDTSTSTAYMELRSLRSDDTAVYYCARHGGTGRGAMDYWGQGTLVTVSSASTKGPSVFPLAPSSKSTSGGTAALGCLVKDYFPEPVTVSWNSGALTSGVHTFPAVLQSSGLYSLSSVVTVPSSSLGTQTYICNVNHKPSNTKVDKKVEPKSCDKTHTCPPCPAPELLGGPSVFLFPPKPKDTLMISRTPEVTCVVVDVSHEDPEVKFNWYVDGVEVHNAKTKPREEQYNSTYRVVSVLTVLHQDWLNGKEYKCKVSNKALPAPIEKTISKAKGQPREPQVYTLPPSRDELTKNQVSLTCLVKGFYPSDIAVEWESNGQPENNYKTTPPVLDSDGSFFLYSKLTVDKSRWQQGNVFSCSVMHEALHNHYTQKSLSLSPGK

SEQ ID NO: 934 - protein, 218 aa, Artificial Sequence; identical to SEQ ID NO: 766
  Made in Lab - Exemplary Light Chain Sequence

SEQ ID NO: 935 - protein, 450 aa, Artificial Sequence; identical to SEQ ID NO: 849
  Made in Lab - Exemplary Heavy Chain Sequence

SEQ ID NO: 936 - protein, 218 aa, Artificial Sequence; identical to SEQ ID NO: 766
  Made in Lab - Exemplary Light Chain Sequence

SEQ ID NO: 937 - protein, 450 aa, Artificial Sequence
  Made in Lab - Exemplary Heavy Chain Sequence
QVQLVQSGAEVKKPGASVKVSCKASGYTFTFNIIHWVRQAPGQGLEWMGWIHPGSGAIKYAQKLQGRVTMTTDTSTSTAYMELRSLRSDDTAVYYCARHGGTGRGAMDYWGQGTLVTVSSASTKGPSVFPLAPSSKSTSGGTAALGCLVKDYFPEPVTVSWNSGALTSGVHTFPAVLQSSGLYSLSSVVTVPSSSLGTQTYICNVNHKPSNTKVDKKVEPKSCDKTHTCPPCPAPELLGGPSVFLFPPKPKDTLMISRTPEVTCVVVDVSHEDPEVKFNWYVDGVEVHNAKTKPREEQYNSTYRVVSVLTVLHQDWLNGKEYKCKVSNKALPAPIEKTISKAKGQPREPQVYTLPPSRDELTKNQVSLTCLVKGFYPSDIAVEWESNGQPENNYKTTPPVLDSDGSFFLYSKLTVDKSRWQQGNVFSCSVMHEALHNHYTQKSLSLSPGK

SEQ ID NO: 938 - protein, 218 aa, Artificial Sequence; identical to SEQ ID NO: 766
  Made in Lab - Exemplary Light Chain Sequence

SEQ ID NO: 939 - protein, 450 aa, Artificial Sequence
  Made in Lab - Exemplary Heavy Chain Sequence
QVQLVQSGAEVKKPGASVKVSCKASGYTFTGNIIHWVRQAPGQGLEWMGWIHPGSGAIKYAQKLQGRVTMTTDTSTSTAYMELRSLRSDDTAVYYCARHGGTGRGAMDYWGQGTLVTVSSASTKGPSVFPLAPSSKSTSGGTAALGCLVKDYFPEPVTVSWNSGALTSGVHTFPAVLQSSGLYSLSSVVTVPSSSLGTQTYICNVNHKPSNTKVDKKVEPKSCDKTHTCPPCPAPELLGGPSVFLFPPKPKDTLMISRTPEVTCVVVDVSHEDPEVKFNWYVDGVEVHNAKTKPREEQYNSTYRVVSVLTVLHQDWLNGKEYKCKVSNKALPAPIEKTISKAKGQPREPQVYTLPPSRDELTKNQVSLTCLVKGFYPSDIAVEWESNGQPENNYKTTPPVLDSDGSFFLYSKLTVDKSRWQQGNVFSCSVMHEALHNHYTQKSLSLSPGK

SEQ ID NO: 940 - protein, 218 aa, Artificial Sequence; identical to SEQ ID NO: 766
  Made in Lab - Exemplary Light Chain Sequence

SEQ ID NO: 941 - protein, 450 aa, Artificial Sequence
  Made in Lab - Exemplary Heavy Chain Sequence
QVQLVQSGAEVKKPGASVKVSCKASGYTFTHNIIHWVRQAPGQGLEWMGWIHPGSGAIKYAQKLQGRVTMTTDTSTSTAYMELRSLRSDDTAVYYCARHGGTGRGAMDYWGQGTLVTVSSASTKGPSVFPLAPSSKSTSGGTAALGCLVKDYFPEPVTVSWNSGALTSGVHTFPAVLQSSGLYSLSSVVTVPSSSLGTQTYICNVNHKPSNTKVDKKVEPKSCDKTHTCPPCPAPELLGGPSVFLFPPKPKDTLMISRTPEVTCVVVDVSHEDPEVKFNWYVDGVEVHNAKTKPREEQYNSTYRVVSVLTVLHQDWLNGKEYKCKVSNKALPAPIEKTISKAKGQPREPQVYTLPPSRDELTKNQVSLTCLVKGFYPSDIAVEWESNGQPENNYKTTPPVLDSDGSFFLYSKLTVDKSRWQQGNVFSCSVMHEALHNHYTQKSLSLSPGK

SEQ ID NO: 942 - protein, 218 aa, Artificial Sequence; identical to SEQ ID NO: 766
  Made in Lab - Exemplary Light Chain Sequence

SEQ ID NO: 943 - protein, 450 aa, Artificial Sequence
  Made in Lab - Exemplary Heavy Chain Sequence
QVQLVQSGAEVKKPGASVKVSCKASGYTFTINIIHWVRQAPGQGLEWMGWIHPGSGAIKYAQKLQGRVTMTTDTSTSTAYMELRSLRSDDTAVYYCARHGGTGRGAMDYWGQGTLVTVSSASTKGPSVFPLAPSSKSTSGGTAALGCLVKDYFPEPVTVSWNSGALTSGVHTFPAVLQSSGLYSLSSVVTVPSSSLGTQTYICNVNHKPSNTKVDKKVEPKSCDKTHTCPPCPAPELLGGPSVFLFPPKPKDTLMISRTPEVTCVVVDVSHEDPEVKFNWYVDGVEVHNAKTKPREEQYNSTYRVVSVLTVLHQDWLNGKEYKCKVSNKALPAPIEKTISKAKGQPREPQVYTLPPSRDELTKNQVSLTCLVKGFYPSDIAVEWESNGQPENNYKTTPPVLDSDGSFFLYSKLTVDKSRWQQGNVFSCSVMHEALHNHYTQKSLSLSPGK

SEQ ID NO: 944 - protein, 218 aa, Artificial Sequence; identical to SEQ ID NO: 766
  Made in Lab - Exemplary Light Chain Sequence

SEQ ID NO: 945 - protein, 450 aa, Artificial Sequence
  Made in Lab - Exemplary Heavy Chain Sequence
QVQLVQSGAEVKKPGASVKVSCKASGYTFTKNIIHWVRQAPGQGLEWMGWIHPGSGAIKYAQKLQGRVTMTTDTSTSTAYMELRSLRSDDTAVYYCARHGGTGRGAMDYWGQGTLVTVSSASTKGPSVFPLAPSSKSTSGGTAALGCLVKDYFPEPVTVSWNSGALTSGVHTFPAVLQSSGLYSLSSVVTVPSSSLGTQTYICNVNHKPSNTKVDKKVEPKSCDKTHTCPPCPAPELLGGPSVFLFPPKPKDTLMISRTPEVTCVVVDVSHEDPEVKFNWYVDGVEVHNAKTKPREEQYNSTYRVVSVLTVLHQDWLNGKEYKCKVSNKALPAPIEKTISKAKGQPREPQVYTLPPSRDELTKNQVSLTCLVKGFYPSDIAVEWESNGQPENNYKTTPPVLDSDGSFFLYSKLTVDKSRWQQGNVFSCSVMHEALHNHYTQKSLSLSPGK

SEQ ID NO: 946 - protein, 218 aa, Artificial Sequence; identical to SEQ ID NO: 766
  Made in Lab - Exemplary Light Chain Sequence

SEQ ID NO: 947 - protein, 450 aa, Artificial Sequence
  Made in Lab - Exemplary Heavy Chain Sequence
QVQLVQSGAEVKKPGASVKVSCKASGYTFTLNIIHWVRQAPGQGLEWMGWIHPGSGAIKYAQKLQGRVTMTTDTSTSTAYMELRSLRSDDTAVYYCARHGGTGRGAMDYWGQGTLVTVSSASTKGPSVFPLAPSSKSTSGGTAALGCLVKDYFPEPVTVSWNSGALTSGVHTFPAVLQSSGLYSLSSVVTVPSSSLGTQTYICNVNHKPSNTKVDKKVEPKSCDKTHTCPPCPAPELLGGPSVFLFPPKPKDTLMISRTPEVTCVVVDVSHEDPEVKFNWYVDGVEVHNAKTKPREEQYNSTYRVVSVLTVLHQDWLNGKEYKCKVSNKALPAPIEKTISKAKGQPREPQVYTLPPSRDELTKNQVSLTCLVKGFYPSDIAVEWESNGQPENNYKTTPPVLDSDGSFFLYSKLTVDKSRWQQGNVFSCSVMHEALHNHYTQKSLSLSPGK

SEQ ID NO: 948 - protein, 218 aa, Artificial Sequence; identical to SEQ ID NO: 766
  Made in Lab - Exemplary Light Chain Sequence

SEQ ID NO: 949 - protein, 450 aa, Artificial Sequence
  Made in Lab - Exemplary Heavy Chain Sequence
QVQLVQSGAEVKKPGASVKVSCKASGYTFTMNIIHWVRQAPGQGLEWMGWIHPGSGAIKYAQKLQGRVTMTTDTSTSTAYMELRSLRSDDTAVYYCARHGGTGRGAMDYWGQGTLVTVSSASTKGPSVFPLAPSSKSTSGGTAALGCLVKDYFPEPVTVSWNSGALTSGVHTFPAVLQSSGLYSLSSVVTVPSSSLGTQTYICNVNHKPSNTKVDKKVEPKSCDKTHTCPPCPAPELLGGPSVFLFPPKPKDTLMISRTPEVTCVVVDVSHEDPEVKFNWYVDGVEVHNAKTKPREEQYNSTYRVVSVLTVLHQDWLNGKEYKCKVSNKALPAPIEKTISKAKGQPREPQVYTLPPSRDELTKNQVSLTCLVKGFYPSDIAVEWESNGQPENNYKTTPPVLDSDGSFFLYSKLTVDKSRWQQGNVFSCSVMHEALHNHYTQKSLSLSPGK

SEQ ID NO: 950 - protein, 218 aa, Artificial Sequence; identical to SEQ ID NO: 766
  Made in Lab - Exemplary Light Chain Sequence

SEQ ID NO: 951 - protein, 450 aa, Artificial Sequence
  Made in Lab - Exemplary Heavy Chain Sequence
QVQLVQSGAEVKKPGASVKVSCKASGYTFTNNIIHWVRQAPGQGLEWMGWIHPGSGAIKYAQKLQGRVTMTTDTSTSTAYMELRSLRSDDTAVYYCARHGGTGRGAMDYWGQGTLVTVSSASTKGPSVFPLAPSSKSTSGGTAALGCLVKDYFPEPVTVSWNSGALTSGVHTFPAVLQSSGLYSLSSVVTVPSSSLGTQTYICNVNHKPSNTKVDKKVEPKSCDKTHTCPPCPAPELLGGPSVFLFPPKPKDTLMISRTPEVTCVVVDVSHEDPEVKFNWYVDGVEVHNAKTKPREEQYNSTYRVVSVLTVLHQDWLNGKEYKCKVSNKALPAPIEKTISKAKGQPREPQVYTLPPSRDELTKNQVSLTCLVKGFYPSDIAVEWESNGQPENNYKTTPPVLDSDGSFFLYSKLTVDKSRWQQGNVFSCSVMHEALHNHYTQKSLSLSPGK

SEQ ID NO: 952 - protein, 218 aa, Artificial Sequence; identical to SEQ ID NO: 766
  Made in Lab - Exemplary Light Chain Sequence

SEQ ID NO: 953 - protein, 450 aa, Artificial Sequence
  Made in Lab - Exemplary Heavy Chain Sequence
QVQLVQSGAEVKKPGASVKVSCKASGYTFTPNIIHWVRQAPGQGLEWMGWIHPGSGAIKYAQKLQGRVTMTTDTSTSTAYMELRSLRSDDTAVYYCARHGGTGRGAMDYWGQGTLVTVSSASTKGPSVFPLAPSSKSTSGGTAALGCLVKDYFPEPVTVSWNSGALTSGVHTFPAVLQSSGLYSLSSVVTVPSSSLGTQTYICNVNHKPSNTKVDKKVEPKSCDKTHTCPPCPAPELLGGPSVFLFPPKPKDTLMISRTPEVTCVVVDVSHEDPEVKFNWYVDGVEVHNAKTKPREEQYNSTYRVVSVLTVLHQDWLNGKEYKCKVSNKALPAPIEKTISKAKGQPREPQVYTLPPSRDELTKNQVSLTCLVKGFYPSDIAVEWESNGQPENNYKTTPPVLDSDGSFFLYSKLTVDKSRWQQGNVFSCSVMHEALHNHYTQKSLSLSPGK

SEQ ID NO: 954 - protein, 218 aa, Artificial Sequence; identical to SEQ ID NO: 766
  Made in Lab - Exemplary Light Chain Sequence

SEQ ID NO: 955 - protein, 450 aa, Artificial Sequence
  Made in Lab - Exemplary Heavy Chain Sequence
QVQLVQSGAEVKKPGASVKVSCKASGYTFTQNIIHWVRQAPGQGLEWMGWIHPGSGAIKYAQKLQGRVTMTTDTSTSTAYMELRSLRSDDTAVYYCARHGGTGRGAMDYWGQGTLVTVSSASTKGPSVFPLAPSSKSTSGGTAALGCLVKDYFPEPVTVSWNSGALTSGVHTFPAVLQSSGLYSLSSVVTVPSSSLGTQTYICNVNHKPSNTKVDKKVEPKSCDKTHTCPPCPAPELLGGPSVFLFPPKPKDTLMISRTPEVTCVVVDVSHEDPEVKFNWYVDGVEVHNAKTKPREEQYNSTYRVVSVLTVLHQDWLNGKEYKCKVSNKALPAPIEKTISKAKGQPREPQVYTLPPSRDELTKNQVSLTCLVKGFYPSDIAVEWESNGQPENNYKTTPPVLDSDGSFFLYSKLTVDKSRWQQGNVFSCSVMHEALHNHYTQKSLSLSPGK

SEQ ID NO: 956 - protein, 218 aa, Artificial Sequence; identical to SEQ ID NO: 766
  Made in Lab - Exemplary Light Chain Sequence

SEQ ID NO: 957 - protein, 450 aa, Artificial Sequence
  Made in Lab - Exemplary Heavy Chain Sequence
QVQLVQSGAEVKKPGASVKVSCKASGYTFTRNIIHWVRQAPGQGLEWMGWIHPGSGAIKYAQKLQGRVTMTTDTSTSTAYMELRSLRSDDTAVYYCARHGGTGRGAMDYWGQGTLVTVSSASTKGPSVFPLAPSSKSTSGGTAALGCLVKDYFPEPVTVSWNSGALTSGVHTFPAVLQSSGLYSLSSVVTVPSSSLGTQTYICNVNHKPSNTKVDKKVEPKSCDKTHTCPPCPAPELLGGPSVFLFPPKPKDTLMISRTPEVTCVVVDVSHEDPEVKFNWYVDGVEVHNAKTKPREEQYNSTYRVVSVLTVLHQDWLNGKEYKCKVSNKALPAPIEKTISKAKGQPREPQVYTLPPSRDELTKNQVSLTCLVKGFYPSDIAVEWESNGQPENNYKTTPPVLDSDGSFFLYSKLTVDKSRWQQGNVFSCSVMHEALHNHYTQKSLSLSPGK

SEQ ID NO: 958 - protein, 218 aa, Artificial Sequence; identical to SEQ ID NO: 766
  Made in Lab - Exemplary Light Chain Sequence

SEQ ID NO: 959 - protein, 450 aa, Artificial Sequence
  Made in Lab - Exemplary Heavy Chain Sequence
QVQLVQSGAEVKKPGASVKVSCKASGYTFTTNIIHWVRQAPGQGLEWMGWIHPGSGAIKYAQKLQGRVTMTTDTSTSTAYMELRSLRSDDTAVYYCARHGGTGRGAMDYWGQGTLVTVSSASTKGPSVFPLAPSSKSTSGGTAALGCLVKDYFPEPVTVSWNSGALTSGVHTFPAVLQSSGLYSLSSVVTVPSSSLGTQTYICNVNHKPSNTKVDKKVEPKSCDKTHTCPPCPAPELLGGPSVFLFPPKPKDTLMISRTPEVTCVVVDVSHEDPEVKFNWYVDGVEVHNAKTKPREEQYNSTYRVVSVLTVLHQDWLNGKEYKCKVSNKALPAPIEKTISKAKGQPREPQVYTLPPSRDELTKNQVSLTCLVKGFYPSDIAVEWESNGQPENNYKTTPPVLDSDGSFFLYSKLTVDKSRWQQGNVFSCSVMHEALHNHYTQKSLSLSPGK

SEQ ID NO: 960 - protein, 218 aa, Artificial Sequence; identical to SEQ ID NO: 766
  Made in Lab - Exemplary Light Chain Sequence

SEQ ID NO: 961 - protein, 450 aa, Artificial Sequence
  Made in Lab - Exemplary Heavy Chain Sequence
QVQLVQSGAEVKKPGASVKVSCKASGYTFTVNIIHWVRQAPGQGLEWMGWIHPGSGAIKYAQKLQGRVTMTTDTSTSTAYMELRSLRSDDTAVYYCARHGGTGRGAMDYWGQGTLVTVSSASTKGPSVFPLAPSSKSTSGGTAALGCLVKDYFPEPVTVSWNSGALTSGVHTFPAVLQSSGLYSLSSVVTVPSSSLGTQTYICNVNHKPSNTKVDKKVEPKSCDKTHTCPPCPAPELLGGPSVFLFPPKPKDTLMISRTPEVTCVVVDVSHEDPEVKFNWYVDGVEVHNAKTKPREEQYNSTYRVVSVLTVLHQDWLNGKEYKCKVSNKALPAPIEKTISKAKGQPREPQVYTLPPSRDELTKNQVSLTCLVKGFYPSDIAVEWESNGQPENNYKTTPPVLDSDGSFFLYSKLTVDKSRWQQGNVFSCSVMHEALHNHYTQKSLSLSPGK

SEQ ID NO: 962 - protein, 218 aa, Artificial Sequence; identical to SEQ ID NO: 766
  Made in Lab - Exemplary Light Chain Sequence

SEQ ID NO: 963 - protein, 450 aa, Artificial Sequence
  Made in Lab - Exemplary Heavy Chain Sequence
QVQLVQSGAEVKKPGASVKVSCKASGYTFTWNIIHWVRQAPGQGLEWMGWIHPGSGAIKYAQKLQGRVTMTTDTSTSTAYMELRSLRSDDTAVYYCARHGGTGRGAMDYWGQGTLVTVSSASTKGPSVFPLAPSSKSTSGGTAALGCLVKDYFPEPVTVSWNSGALTSGVHTFPAVLQSSGLYSLSSVVTVPSSSLGTQTYICNVNHKPSNTKVDKKVEPKSCDKTHTCPPCPAPELLGGPSVFLFPPKPKDTLMISRTPEVTCVVVDVSHEDPEVKFNWYVDGVEVHNAKTKPREEQYNSTYRVVSVLTVLHQDWLNGKEYKCKVSNKALPAPIEKTISKAKGQPREPQVYTLPPSRDELTKNQVSLTCLVKGFYPSDIAVEWESNGQPENNYKTTPPVLDSDGSFFLYSKLTVDKSRWQQGNVFSCSVMHEALHNHYTQKSLSLSPGK

SEQ ID NO: 964 - protein, 218 aa, Artificial Sequence; identical to SEQ ID NO: 766
  Made in Lab - Exemplary Light Chain Sequence

SEQ ID NO: 965 - protein, 450 aa, Artificial Sequence
  Made in Lab - Exemplary Heavy Chain Sequence
QVQLVQSGAEVKKPGASVKVSCKASGYTFTYNIIHWVRQAPGQGLEWMGWIHPGSGAIKYAQKLQGRVTMTTDTSTSTAYMELRSLRSDDTAVYYCARHGGTGRGAMDYWGQGTLVTVSSASTKGPSVFPLAPSSKSTSGGTAALGCLVKDYFPEPVTVSWNSGALTSGVHTFPAVLQSSGLYSLSSVVTVPSSSLGTQTYICNVNHKPSNTKVDKKVEPKSCDKTHTCPPCPAPELLGGPSVFLFPPKPKDTLMISRTPEVTCVVVDVSHEDPEVKFNWYVDGVEVHNAKTKPREEQYNSTYRVVSVLTVLHQDWLNGKEYKCKVSNKALPAPIEKTISKAKGQPREPQVYTLPPSRDELTKNQVSLTCLVKGFYPSDIAVEWESNGQPENNYKTTPPVLDSDGSFFLYSKLTVDKSRWQQGNVFSCSVMHEALHNHYTQKSLSLSPGK

SEQ ID NO: 966 - protein, 218 aa, Artificial Sequence; identical to SEQ ID NO: 766
  Made in Lab - Exemplary Light Chain Sequence

SEQ ID NO: 967 - protein, 450 aa, Artificial Sequence
  Made in Lab - Exemplary Heavy Chain Sequence
QVQLVQSGAEVKKPGASVKVSCKASGYTFTSNIIHWVRQAPGQGLEWMGWIHPGSGDIKYAQKLQGRVTMTTDTSTSTAYMELRSLRSDDTAVYYCARHGGTGRGAMDYWGQGTLVTVSSASTKGPSVFPLAPSSKSTSGGTAALGCLVKDYFPEPVTVSWNSGALTSGVHTFPAVLQSSGLYSLSSVVTVPSSSLGTQTYICNVNHKPSNTKVDKKVEPKSCDKTHTCPPCPAPELLGGPSVFLFPPKPKDTLMISRTPEVTCVVVDVSHEDPEVKFNWYVDGVEVHNAKTKPREEQYNSTYRVVSVLTVLHQDWLNGKEYKCKVSNKALPAPIEKTISKAKGQPREPQVYTLPPSRDELTKNQVSLTCLVKGFYPSDIAVEWESNGQPENNYKTTPPVLDSDGSFFLYSKLTVDKSRWQQGNVFSCSVMHEALHNHYTQKSLSLSPGK

SEQ ID NO: 968 - protein, 218 aa, Artificial Sequence; identical to SEQ ID NO: 766
  Made in Lab - Exemplary Light Chain Sequence

SEQ ID NO: 969 - protein, 450 aa, Artificial Sequence
  Made in Lab - Exemplary Heavy Chain Sequence
QVQLVQSGAEVKKPGASVKVSCKASGYTFTSNIIHWVRQAPGQGLEWMGWIHPGSGEIKYAQKLQGRVTMTTDTSTSTAYMELRSLRSDDTAVYYCARHGGTGRGAMDYWGQGTLVTVSSASTKGPSVFPLAPSSKSTSGGTAALGCLVKDYFPEPVTVSWNSGALTSGVHTFPAVLQSSGLYSLSSVVTVPSSSLGTQTYICNVNHKPSNTKVDKKVEPKSCDKTHTCPPCPAPELLGGPSVFLFPPKPKDTLMISRTPEVTCVVVDVSHEDPEVKFNWYVDGVEVHNAKTKPREEQYNSTYRVVSVLTVLHQDWLNGKEYKCKVSNKALPAPIEKTISKAKGQPREPQVYTLPPSRDELTKNQVSLTCLVKGFYPSDIAVEWESNGQPENNYKTTPPVLDSDGSFFLYSKLTVDKSRWQQGNVFSCSVMHEALHNHYTQKSLSLSPGK

SEQ ID NO: 970 - protein, 218 aa, Artificial Sequence; identical to SEQ ID NO: 766
  Made in Lab - Exemplary Light Chain Sequence

SEQ ID NO: 971 - protein, 450 aa, Artificial Sequence
  Made in Lab - Exemplary Heavy Chain Sequence
QVQLVQSGAEVKKPGASVKVSCKASGYTFTSNIIHWVRQAPGQGLEWMGWIHPGSGFIKYAQKLQGRVTMTTDTSTSTAYMELRSLRSDDTAVYYCARHGGTGRGAMDYWGQGTLVTVSSASTKGPSVFPLAPSSKSTSGGTAALGCLVKDYFPEPVTVSWNSGALTSGVHTFPAVLQSSGLYSLSSVVTVPSSSLGTQTYICNVNHKPSNTKVDKKVEPKSCDKTHTCPPCPAPELLGGPSVFLFPPKPKDTLMISRTPEVTCVVVDVSHEDPEVKFNWYVDGVEVHNAKTKPREEQYNSTYRVVSVLTVLHQDWLNGKEYKCKVSNKALPAPIEKTISKAKGQPREPQVYTLPPSRDELTKNQVSLTCLVKGFYPSDIAVEWESNGQPENNYKTTPPVLDSDGSFFLYSKLTVDKSRWQQGNVFSCSVMHEALHNHYTQKSLSLSPGK

SEQ ID NO: 972 - protein, 218 aa, Artificial Sequence; identical to SEQ ID NO: 766
  Made in Lab - Exemplary Light Chain Sequence

SEQ ID NO: 973 - protein, 450 aa, Artificial Sequence
  Made in Lab - Exemplary Heavy Chain Sequence
QVQLVQSGAEVKKPGASVKVSCKASGYTFTSNIIHWVRQAPGQGLEWMGWIHPGSGGIKYAQKLQGRVTMTTDTSTSTAYMELRSLRSDDTAVYYCARHGGTGRGAMDYWGQGTLVTVSSASTKGPSVFPLAPSSKSTSGGTAALGCLVKDYFPEPVTVSWNSGALTSGVHTFPAVLQSSGLYSLSSVVTVPSSSLGTQTYICNVNHKPSNTKVDKKVEPKSCDKTHTCPPCPAPELLGGPSVFLFPPKPKDTLMISRTPEVTCVVVDVSHEDPEVKFNWYVDGVEVHNAKTKPREEQYNSTYRVVSVLTVLHQDWLNGKEYKCKVSNKALPAPIEKTISKAKGQPREPQVYTLPPSRDELTKNQVSLTCLVKGFYPSDIAVEWESNGQPENNYKTTPPVLDSDGSFFLYSKLTVDKSRWQQGNVFSCSVMHEALHNHYTQKSLSLSPGK

SEQ ID NO: 974 - protein, 218 aa, Artificial Sequence; identical to SEQ ID NO: 766
  Made in Lab - Exemplary Light Chain Sequence

SEQ ID NO: 975 - protein, 450 aa, Artificial Sequence
  Made in Lab - Exemplary Heavy Chain Sequence
QVQLVQSGAEVKKPGASVKVSCKASGYTFTSNIIHWVRQAPGQGLEWMGWIHPGSGHIKYAQKLQGRVTMTTDTSTSTAYMELRSLRSDDTAVYYCARHGGTGRGAMDYWGQGTLVTVSSASTKGPSVFPLAPSSKSTSGGTAALGCLVKDYFPEPVTVSWNSGALTSGVHTFPAVLQSSGLYSLSSVVTVPSSSLGTQTYICNVNHKPSNTKVDKKVEPKSCDKTHTCPPCPAPELLGGPSVFLFPPKPKDTLMISRTPEVTCVVVDVSHEDPEVKFNWYVDGVEVHNAKTKPREEQYNSTYRVVSVLTVLHQDWLNGKEYKCKVSNKALPAPIEKTISKAKGQPREPQVYTLPPSRDELTKNQVSLTCLVKGFYPSDIAVEWESNGQPENNYKTTPPVLDSDGSFFLYSKLTVDKSRWQQGNVFSCSVMHEALHNHYTQKSLSLSPGK

SEQ ID NO: 976 - protein, 218 aa, Artificial Sequence; identical to SEQ ID NO: 766
  Made in Lab - Exemplary Light Chain Sequence

SEQ ID NO: 977 - protein, 450 aa, Artificial Sequence
  Made in Lab - Exemplary Heavy Chain Sequence
QVQLVQSGAEVKKPGASVKVSCKASGYTFTSNIIHWVRQAPGQGLEWMGWIHPGSGIIKYAQKLQGRVTMTTDTSTSTAYMELRSLRSDDTAVYYCARHGGTGRGAMDYWGQGTLVTVSSASTKGPSVFPLAPSSKSTSGGTAALGCLVKDYFPEPVTVSWNSGALTSGVHTFPAVLQSSGLYSLSSVVTVPSSSLGTQTYICNVNHKPSNTKVDKKVEPKSCDKTHTCPPCPAPELLGGPSVFLFPPKPKDTLMISRTPEVTCVVVDVSHEDPEVKFNWYVDGVEVHNAKTKPREEQYNSTYRVVSVLTVLHQDWLNGKEYKCKVSNKALPAPIEKTISKAKGQPREPQVYTLPPSRDELTKNQVSLTCLVKGFYPSDIAVEWESNGQPENNYKTTPPVLDSDGSFFLYSKLTVDKSRWQQGNVFSCSVMHEALHNHYTQKSLSLSPGK

SEQ ID NO: 978 - protein, 218 aa, Artificial Sequence; identical to SEQ ID NO: 766
  Made in Lab - Exemplary Light Chain Sequence

SEQ ID NO: 979 - protein, 450 aa, Artificial Sequence
  Made in Lab - Exemplary Heavy Chain Sequence
QVQLVQSGAEVKKPGASVKVSCKASGYTFTSNIIHWVRQAPGQGLEWMGWIHPGSGKIKYAQKLQGRVTMTTDTSTSTAYMELRSLRSDDTAVYYCARHGGTGRGAMDYWGQGTLVTVSSASTKGPSVFPLAPSSKSTSGGTAALGCLVKDYFPEPVTVSWNSGALTSGVHTFPAVLQSSGLYSLSSVVTVPSSSLGTQTYICNVNHKPSNTKVDKKVEPKSCDKTHTCPPCPAPELLGGPSVFLFPPKPKDTLMISRTPEVTCVVVDVSHEDPEVKFNWYVDGVEVHNAKTKPREEQYNSTYRVVSVLTVLHQDWLNGKEYKCKVSNKALPAPIEKTISKAKGQPREPQVYTLPPSRDELTKNQVSLTCLVKGFYPSDIAVEWESNGQPENNYKTTPPVLDSDGSFFLYSKLTVDKSRWQQGNVFSCSVMHEALHNHYTQKSLSLSPGK

SEQ ID NO: 980 - protein, 218 aa, Artificial Sequence; identical to SEQ ID NO: 766
  Made in Lab - Exemplary Light Chain Sequence

SEQ ID NO: 981 - protein, 450 aa, Artificial Sequence
  Made in Lab - Exemplary Heavy Chain Sequence
QVQLVQSGAEVKKPGASVKVSCKASGYTFTSNIIHWVRQAPGQGLEWMGWIHPGSGLIKYAQKLQGRVTMTTDTSTSTAYMELRSLRSDDTAVYYCARHGGTGRGAMDYWGQGTLVTVSSASTKGPSVFPLAPSSKSTSGGTAALGCLVKDYFPEPVTVSWNSGALTSGVHTFPAVLQSSGLYSLSSVVTVPSSSLGTQTYICNVNHKPSNTKVDKKVEPKSCDKTHTCPPCPAPELLGGPSVFLFPPKPKDTLMISRTPEVTCVVVDVSHEDPEVKFNWYVDGVEVHNAKTKPREEQYNSTYRVVSVLTVLHQDWLNGKEYKCKVSNKALPAPIEKTISKAKGQPREPQVYTLPPSRDELTKNQVSLTCLVKGFYPSDIAVEWESNGQPENNYKTTPPVLDSDGSFFLYSKLTVDKSRWQQGNVFSCSVMHEALHNHYTQKSLSLSPGK

SEQ ID NO: 982 - protein, 218 aa, Artificial Sequence; identical to SEQ ID NO: 766
  Made in Lab - Exemplary Light Chain Sequence

SEQ ID NO: 983 - protein, 450 aa, Artificial Sequence
  Made in Lab - Exemplary Heavy Chain Sequence
QVQLVQSGAEVKKPGASVKVSCKASGYTFTSNIIHWVRQAPGQGLEWMGWIHPGSGMIKYAQKLQGRVTMTTDTSTSTAYMELRSLRSDDTAVYYCARHGGTGRGAMDYWGQGTLVTVSSASTKGPSVFPLAPSSKSTSGGTAALGCLVKDYFPEPVTVSWNSGALTSGVHTFPAVLQSSGLYSLSSVVTVPSSSLGTQTYICNVNHKPSNTKVDKKVEPKSCDKTHTCPPCPAPELLGGPSVFLFPPKPKDTLMISRTPEVTCVVVDVSHEDPEVKFNWYVDGVEVHNAKTKPREEQYNSTYRVVSVLTVLHQDWLNGKEYKCKVSNKALPAPIEKTISKAKGQPREPQVYTLPPSRDELTKNQVSLTCLVKGFYPSDIAVEWESNGQPENNYKTTPPVLDSDGSFFLYSKLTVDKSRWQQGNVFSCSVMHEALHNHYTQKSLSLSPGK

SEQ ID NO: 984 - protein, 218 aa, Artificial Sequence; identical to SEQ ID NO: 766
  Made in Lab - Exemplary Light Chain Sequence

SEQ ID NO: 985 - protein, 450 aa, Artificial Sequence
  Made in Lab - Exemplary Heavy Chain Sequence
QVQLVQSGAEVKKPGASVKVSCKASGYTFTSNIIHWVRQAPGQGLEWMGWIHPGSGNIKYAQKLQGRVTMTTDTSTSTAYMELRSLRSDDTAVYYCARHGGTGRGAMDYWGQGTLVTVSSASTKGPSVFPLAPSSKSTSGGTAALGCLVKDYFPEPVTVSWNSGALTSGVHTFPAVLQSSGLYSLSSVVTVPSSSLGTQTYICNVNHKPSNTKVDKKVEPKSCDKTHTCPPCPAPELLGGPSVFLFPPKPKDTLMISRTPEVTCVVVDVSHEDPEVKFNWYVDGVEVHNAKTKPREEQYNSTYRVVSVLTVLHQDWLNGKEYKCKVSNKALPAPIEKTISKAKGQPREPQVYTLPPSRDELTKNQVSLTCLVKGFYPSDIAVEWESNGQPENNYKTTPPVLDSDGSFFLYSKLTVDKSRWQQGNVFSCSVMHEALHNHYTQKSLSLSPGK

SEQ ID NO: 986 - protein, 218 aa, Artificial Sequence; identical to SEQ ID NO: 766
  Made in Lab - Exemplary Light Chain Sequence

SEQ ID NO: 987 - protein, 450 aa, Artificial Sequence
  Made in Lab - Exemplary Heavy Chain Sequence
QVQLVQSGAEVKKPGASVKVSCKASGYTFTSNIIHWVRQAPGQGLEWMGWIHPGSGPIKYAQKLQGRVTMTTDTSTSTAYMELRSLRSDDTAVYYCARHGGTGRGAMDYWGQGTLVTVSSASTKGPSVFPLAPSSKSTSGGTAALGCLVKDYFPEPVTVSWNSGALTSGVHTFPAVLQSSGLYSLSSVVTVPSSSLGTQTYICNVNHKPSNTKVDKKVEPKSCDKTHTCPPCPAPELLGGPSVFLFPPKPKDTLMISRTPEVTCVVVDVSHEDPEVKFNWYVDGVEVHNAKTKPREEQYNSTYRVVSVLTVLHQDWLNGKEYKCKVSNKALPAPIEKTISKAKGQPREPQVYTLPPSRDELTKNQVSLTCLVKGFYPSDIAVEWESNGQPENNYKTTPPVLDSDGSFFLYSKLTVDKSRWQQGNVFSCSVMHEALHNHYTQKSLSLSPGK

SEQ ID NO: 988 - protein, 218 aa, Artificial Sequence; identical to SEQ ID NO: 766
  Made in Lab - Exemplary Light Chain Sequence

SEQ ID NO: 989 - protein, 450 aa, Artificial Sequence
  Made in Lab - Exemplary Heavy Chain Sequence
QVQLVQSGAEVKKPGASVKVSCKASGYTFTSNIIHWVRQAPGQGLEWMGWIHPGSGQIKYAQKLQGRVTMTTDTSTSTAYMELRSLRSDDTAVYYCARHGGTGRGAMDYWGQGTLVTVSSASTKGPSVFPLAPSSKSTSGGTAALGCLVKDYFPEPVTVSWNSGALTSGVHTFPAVLQSSGLYSLSSVVTVPSSSLGTQTYICNVNHKPSNTKVDKKVEPKSCDKTHTCPPCPAPELLGGPSVFLFPPKPKDTLMISRTPEVTCVVVDVSHEDPEVKFNWYVDGVEVHNAKTKPREEQYNSTYRVVSVLTVLHQDWLNGKEYKCKVSNKALPAPIEKTISKAKGQPREPQVYTLPPSRDELTKNQVSLTCLVKGFYPSDIAVEWESNGQPENNYKTTPPVLDSDGSFFLYSKLTVDKSRWQQGNVFSCSVMHEALHNHYTQKSLSLSPGK

SEQ ID NO: 990 - protein, 218 aa, Artificial Sequence; identical to SEQ ID NO: 766
  Made in Lab - Exemplary Light Chain Sequence

SEQ ID NO: 991 - protein, 450 aa, Artificial Sequence
  Made in Lab - Exemplary Heavy Chain Sequence
QVQLVQSGAEVKKPGASVKVSCKASGYTFTSNIIHWVRQAPGQGLEWMGWIHPGSGRIKYAQKLQGRVTMTTDTSTSTAYMELRSLRSDDTAVYYCARHGGTGRGAMDYWGQGTLVTVSSASTKGPSVFPLAPSSKSTSGGTAALGCLVKDYFPEPVTVSWNSGALTSGVHTFPAVLQSSGLYSLSSVVTVPSSSLGTQTYICNVNHKPSNTKVDKKVEPKSCDKTHTCPPCPAPELLGGPSVFLFPPKPKDTLMISRTPEVTCVVVDVSHEDPEVKFNWYVDGVEVHNAKTKPREEQYNSTYRVVSVLTVLHQDWLNGKEYKCKVSNKALPAPIEKTISKAKGQPREPQVYTLPPSRDELTKNQVSLTCLVKGFYPSDIAVEWESNGQPENNYKTTPPVLDSDGSFFLYSKLTVDKSRWQQGNVFSCSVMHEALHNHYTQKSLSLSPGK

SEQ ID NO: 992 - protein, 218 aa, Artificial Sequence; identical to SEQ ID NO: 766
  Made in Lab - Exemplary Light Chain Sequence

SEQ ID NO: 993 - protein, 450 aa, Artificial Sequence
  Made in Lab - Exemplary Heavy Chain Sequence
QVQLVQSGAEVKKPGASVKVSCKASGYTFTSNIIHWVRQAPGQGLEWMGWIHPGSGTIKYAQKLQGRVTMTTDTSTSTAYMELRSLRSDDTAVYYCARHGGTGRGAMDYWGQGTLVTVSSASTKGPSVFPLAPSSKSTSGGTAALGCLVKDYFPEPVTVSWNSGALTSGVHTFPAVLQSSGLYSLSSVVTVPSSSLGTQTYICNVNHKPSNTKVDKKVEPKSCDKTHTCPPCPAPELLGGPSVFLFPPKPKDTLMISRTPEVTCVVVDVSHEDPEVKFNWYVDGVEVHNAKTKPREEQYNSTYRVVSVLTVLHQDWLNGKEYKCKVSNKALPAPIEKTISKAKGQPREPQVYTLPPSRDELTKNQVSLTCLVKGFYPSDIAVEWESNGQPENNYKTTPPVLDSDGSFFLYSKLTVDKSRWQQGNVFSCSVMHEALHNHYTQKSLSLSPGK

SEQ ID NO: 994 - protein, 218 aa, Artificial Sequence; identical to SEQ ID NO: 766
  Made in Lab - Exemplary Light Chain Sequence

SEQ ID NO: 995 - protein, 450 aa, Artificial Sequence
  Made in Lab - Exemplary Heavy Chain Sequence
QVQLVQSGAEVKKPGASVKVSCKASGYTFTSNIIHWVRQAPGQGLEWMGWIHPGSGVIKYAQKLQGRVTMTTDTSTSTAYMELRSLRSDDTAVYYCARHGGTGRGAMDYWGQGTLVTVSSASTKGPSVFPLAPSSKSTSGGTAALGCLVKDYFPEPVTVSWNSGALTSGVHTFPAVLQSSGLYSLSSVVTVPSSSLGTQTYICNVNHKPSNTKVDKKVEPKSCDKTHTCPPCPAPELLGGPSVFLFPPKPKDTLMISRTPEVTCVVVDVSHEDPEVKFNWYVDGVEVHNAKTKPREEQYNSTYRVVSVLTVLHQDWLNGKEYKCKVSNKALPAPIEKTISKAKGQPREPQVYTLPPSRDELTKNQVSLTCLVKGFYPSDIAVEWESNGQPENNYKTTPPVLDSDGSFFLYSKLTVDKSRWQQGNVFSCSVMHEALHNHYTQKSLSLSPGK

SEQ ID NO: 996 - protein, 218 aa, Artificial Sequence; identical to SEQ ID NO: 766
  Made in Lab - Exemplary Light Chain Sequence

SEQ ID NO: 997 - protein, 450 aa, Artificial Sequence
  Made in Lab - Exemplary Heavy Chain Sequence
QVQLVQSGAEVKKPGASVKVSCKASGYTFTSNIIHWVRQAPGQGLEWMGWIHPGSGWIKYAQKLQGRVTMTTDTSTSTAYMELRSLRSDDTAVYYCARHGGTGRGAMDYWGQGTLVTVSSASTKGPSVFPLAPSSKSTSGGTAALGCLVKDYFPEPVTVSWNSGALTSGVHTFPAVLQSSGLYSLSSVVTVPSSSLGTQTYICNVNHKPSNTKVDKKVEPKSCDKTHTCPPCPAPELLGGPSVFLFPPKPKDTLMISRTPEVTCVVVDVSHEDPEVKFNWYVDGVEVHNAKTKPREEQYNSTYRVVSVLTVLHQDWLNGKEYKCKVSNKALPAPIEKTISKAKGQPREPQVYTLPPSRDELTKNQVSLTCLVKGFYPSDIAVEWESNGQPENNYKTTPPVLDSDGSFFLYSKLTVDKSRWQQGNVFSCSVMHEALHNHYTQKSLSLSPGK

SEQ ID NO: 998 - protein, 218 aa, Artificial Sequence; identical to SEQ ID NO: 766
  Made in Lab - Exemplary Light Chain Sequence

SEQ ID NO: 999 - protein, 450 aa, Artificial Sequence
  Made in Lab - Exemplary Heavy Chain Sequence
QVQLVQSGAEVKKPGASVKVSCKASGYTFTSNIIHWVRQAPGQGLEWMGWIHPGSGYIKYAQKLQGRVTMTTDTSTSTAYMELRSLRSDDTAVYYCARHGGTGRGAMDYWGQGTLVTVSSASTKGPSVFPLAPSSKSTSGGTAALGCLVKDYFPEPVTVSWNSGALTSGVHTFPAVLQSSGLYSLSSVVTVPSSSLGTQTYICNVNHKPSNTKVDKKVEPKSCDKTHTCPPCPAPELLGGPSVFLFPPKPKDTLMISRTPEVTCVVVDVSHEDPEVKFNWYVDGVEVHNAKTKPREEQYNSTYRVVSVLTVLHQDWLNGKEYKCKVSNKALPAPIEKTISKAKGQPREPQVYTLPPSRDELTKNQVSLTCLVKGFYPSDIAVEWESNGQPENNYKTTPPVLDSDGSFFLYSKLTVDKSRWQQGNVFSCSVMHEALHNHYTQKSLSLSPGK

SEQ ID NO: 1000 - protein, 218 aa, Artificial Sequence; identical to SEQ ID NO: 766
  Made in Lab - Exemplary Light Chain Sequence

SEQ ID NO: 1001 - protein, 450 aa, Artificial Sequence
  Made in Lab - Exemplary Heavy Chain Sequence
QVQLKQSGAELVKPGASVKLSCKTSGYTFTENIIHWVKQRSGQGLEWIGWFHPGSGSIKYNEKFKDKATLTADKSSSTVYMELSRLTSEDSAVYFCARHGGTGRGAMDYWGQGTSVTVSSAKTTAPSVYPLAPVCGDTTGSSVTLGCLVKGYFPEPVTLTWNSGSLSSGVHTFPAVLQSDLYTLSSSVTVTSSTWPSQSITCNVAHPASSTKVDKKIEPRGPTIKPCPPCKCPAPNLLGGPSVFIFPPKIKDVLMISLSPIVTCVVVDVSEDDPDVQISWFVNNVEVHTAQTQTHREDYNSTLRVVSALPIQHQDWMSGKEFKCKVNNKDLPAPIERTISKPKGSVRAPQVYVLPPPEEEMTKKQVTLTCMVTDFMPEDIYVEWTNNGKTELNYKNTEPVLDSDGSYFMYSKLRVEKKNWVERNSYSCSVVHEGLHNHHTTKSFSRTPGK

SEQ ID NO: 1002 - protein, 218 aa, Artificial Sequence
  Made in Lab - Exemplary Light Chain Sequence
DILMTQSPASSVVSLGQRATISCRASKSVSTSAYSYMHWYQQKPGQPPKLLIYLASNLESGVPPRFSGSGSGTDFTLNIHPVEEEDAATYYCQHSRELPYTFGGGTKLEIKRADAAPTVSIFPPSSEQLTSGGASVVCFLNNFYPKDINVKWKIDGSERQNGVLNSWTDQDSKDSTYSMSSTLTLTKDEYERHNSYTCEATHKTSTSPIVKSFNRNEC

SEQ ID NO: 1003 - protein, 450 aa, Artificial Sequence
  Made in Lab - Exemplary Heavy Chain Sequence
QVQLVQSGAEVKKPGASVKVSCKASGYTFTENIIHWVRQAPGQGLEWMGWFHPGSGSIKYNEKFKDRVTMTADTSTSTVYMELSSLRSEDTAVYYCARHGGTGRGAMDYWGQGTLVTVSSASTKGPSVFPLAPSSKSTSGGTAALGCLVKDYFPEPVTVSWNSGALTSGVHTFPAVLQSSGLYSLSSVVTVPSSSLGTQTYICNVNHKPSNTKVDKKVEPKSCDKTHTCPPCPAPELLGGPSVFLFPPKPKDTLMISRTPEVTCVVVDVSHEDPEVKFNWYVDGVEVHNAKTKPREEQYNSTYRVVSVLTVLHQDWLNGKEYKCKVSNKALPAPIEKTISKAKGQPREPQVYTLPPSRDELTKNQVSLTCLVKGFYPSDIAVEWESNGQPENNYKTTPPVLDSDGSFFLYSKLTVDKSRWQQGNVFSCSVMHEALHNHYTQKSLSLSPGK

SEQ ID NO: 1004 - protein, 218 aa, Artificial Sequence
  Made in Lab - Exemplary Light Chain Sequence
DIQMTQSPSSLSASVGDRVTITCRASKSVSTSAYSYMHWYQQKPGKAPKLLIYLASNLESGVPSRFSGSGSGTDFTLTISSLQPEDFATYYCQHSRELPYTFGQGTKLEIKRTVAAPSVFIFPPSDEQLKSGTASVVCLLNNFYPREAKVQWKVDNALQSGNSQESVTEQDSKDSTYSLSSTLTLSKADYEKHKVYACEVTHQGLSSPVTKSFNRGEC

SEQ ID NO: 1005 - protein, 447 aa, Artificial Sequence
  Made in Lab - Exemplary Heavy Chain Sequence
EVQLLESGGGLVQPGGSLRLSCAASGFTFSSYAMSWVRQAPGKGLEWVSAIIGSGASTYYADSVKGRFTISRDNSKNTLYLQMNSLRAEDTAVYYCAKGWFGGFNYWGQGTLVTVSSASTKGPSVFPLAPSSKSTSGGTAALGCLVKDYFPEPVTVSWNSGALTSGVHTFPAVLQSSGLYSLSSVVTVPSSSLGTQTYICNVNHKPSNTKVDKKVEPKSCDKTHTCPPCPAPELLGGPSVFLFPPKPKDTLMISRTPEVTCVVVDVSHEDPEVKFNWYVDGVEVHNAKTKPREEQYNSTYRVVSVLTVLHQDWLNGKEYKCKVSNKALPAPIEKTISKAKGQPREPQVYTLPPSRDELTKNQVSLTCLVKGFYPSDIAVEWESNGQPENNYKTTPPVLDSDGSFFLYSKLTVDKSRWQQGNVFSCSVMHEALHNHYTQKSLSLSPGK

SEQ ID NO: 1006 - protein, 215 aa, Artificial Sequence
  Made in Lab - Exemplary Light Chain Sequence
EIVLTQSPGTLSLSPGERATLSCRASQSVTSSYLAWYQQKPGQAPRLLINVGSRRATGIPDRFSGSGSGTDFTLTISRLEPEDFAVYYCQQGIMLPPTFGQGTKVEIKRTVAAPSVFIFPPSDEQLKSGTASVVCLLNNFYPREAKVQWKVDNALQSGNSQESVTEQDSKDSTYSLSSTLTLSKADYEKHKVYACEVTHQGLSSPVTKSFNRGEC

SEQ ID NO: 1007 - protein, 760 aa, Homo sapiens
MKTWVKIVFGVATSAVLALLVMCIVLRPSRVHNSEENTMRALTLKDILNGTFSYKTFFPNWISGQEYLHQSADNNIVLYNIETGQSYTILSNRTMKSVNASNYGLSPDRQFVYLESDYSKLWRYSYTATYYIYDLSNGEFVRGNELPRPIQYLCWSPVGSKLAYVYQNNIYLKQRPGDPPFQITFNGRENKIFNGIPDWVYEEEMLATKYALWWSPNGKFLAYAEFNDTDIPVIAYSYYGDEQYPRTINIPYPKAGAKNPVVRIFIIDTTYPAYVGPQEVPVPAMIASSDYYFSWLTWVTDERVCLQWLKRVQNVSVLSICDFREDWQTWDCPKTQEHIEESRTGWAGGFFVSTPVFSYDAISYYKIFSDKDGYKHIHYIKDTVENAIQITSGKWEAINIFRVTQDSLFYSSNEFEEYPGRRNIYRISIGSYPPSKKCVTCHLRKERCQYYTASFSDYAKYYALVCYGPGIPISTLHDGRTDQEIKILEENKELENALKNIQLPKEEIKKLEVDEITLWYKMILPPQFDRSKKYPLLIQVYGGPCSQSVRSVFAVNWISYLASKEGMVIALVDGRGTAFQGDKLLYAVYRKLGVYEVEDQITAVRKFIEMGFIDEKRIAIWGWSYGGYVSSLALASGTGLFKCGIAVAPVSSWEYYASVYTERFMGLPTKDDNLEHYKNSTVMARAEYFRNVDYLLIHGTADDNVHFQNSAQIAKALVNAQVDFQAMWYSDQNHGLSGLSTNHLYTHMTHFLKQCFSLSD

SEQ ID NO: 1008 - protein, 735 aa, Homo sapiens
LRPSRVHNSEENTMRALTLKDILNGTFSYKTFFPNWISGQEYLHQSADNNIVLYNIETGQSYTILSNRTMKSVNASNYGLSPDRQFVYLESDYSKLWRYSYTATYYIYDLSNGEFVRGNELPRPIQYLCWSPVGSKLAYVYQNNIYLKQRPGDPPFQITFNGRENKIFNGIPDWVYEEEMLATKYALWWSPNGKFLAYAEFNDTDIPVIAYSYYGDEQYPRTINIPYPKAGAKNPVVRIFIIDTTYPAYVGPQEVPVPAMIASSDYYFSWLTWVTDERVCLQWLKRVQNVSVLSICDFREDWQTWDCPKTQEHIEESRTGWAGGFFVSTPVFSYDAISYYKIFSDKDGYKHIHYIKDTVENAIQITSGKWEAINIFRVTQDSLFYSSNEFEEYPGRRNIYRISIGSYPPSKKCVTCHLRKERCQYYTASFSDYAKYYALVCYGPGIPISTLHDGRTDQEIKILEENKELENALKNIQLPKEEIKKLEVDEITLWYKMILPPQFDRSKKYPLLIQVYGGPCSQSVRSVFAVNWISYLASKEGMVIALVDGRGTAFQGDKLLYAVYRKLGVYEVEDQITAVRKFIEMGFIDEKRIAIWGWSYGGYVSSLALASGTGLFKCGIAVAPVSSWEYYASVYTERFMGLPTKDDNLEHYKNSTVMARAEYFRNVDYLLIHGTADDNVHFQNSAQIAKALVNAQVDFQAMWYSDQNHGLSGLSTNHLYTHMTHFLKQCFSLSD

SEQ ID NO: 1009 - protein, 534 aa, Homo sapiens
MLRRRGSPGMGVHVGAALGALWFCLTGALEVQVPEDPVVALVGTDATLCCSFSPEPGFSLAQLNLIWQLTDTKQLVHSFAEGQDQGSAYANRTALFPDLLAQGNASLRLQRVRVADEGSFTCFVSIRDFGSAAVSLQVAAPYSKPSMTLEPNKDLRPGDTVTITCSSYQGYPEAEVFWQDGQGVPLTGNVTTSQMANEQGLFDVHSILRVVLGANGTYSCLVRNPVLQQDAHSSVTITPQRSPTGAVEVQVPEDPVVALVGTDATLRCSFSPEPGFSLAQLNLIWQLTDTKQLVHSFTEGRDQGSAYANRTALFPDLLAQGNASLRLQRVRVADEGSFTCFVSIRDFGSAAVSLQVAAPYSKPSMTLEPNKDLRPGDTVTITCSSYRGYPEAEVFWQDGQGVPLTGNVTTSQMANEQGLFDVHSVLRVVLGANGTYSCLVRNPVLQQDAHGSVTITGQPMTFPPEALWVTVGLSVCLIALLVALAFVCWRKIKQSCEEENAGAEDQDGEGEGSKTALQPLKHSDSKEDDGQEIA

SEQ ID NO: 1010 - protein, 111 aa, Homo sapiens
LEVQVPEDPVVALVGTDATLCCSFSPEPGFSLAQLNLIWQLTDTKQLVHSFAEGQDQGSAYANRTALFPDLLAQGNASLRLQRVRVADEGSFTCFVSIRDFGSAAVSLQVA

SEQ ID NO: 1011 - protein, 94 aa, Homo sapiens
PSMTLEPNKDLRPGDTVTITCSSYQGYPEAEVFWQDGQGVPLTGNVTTSQMANEQGLFDVHSILRVVLGANGTYSCLVRNPVLQQDAHSSVTIT

SEQ ID NO: 1012 - protein, 115 aa, Homo sapiens
PTGAVEVQVPEDPVVALVGTDATLRCSFSPEPGFSLAQLNLIWQLTDTKQLVHSFTEGRDQGSAYANRTALFPDLLAQGNASLRLQRVRVADEGSFTCFVSIRDFGSAAVSLQVA

SEQ ID NO: 1013 - protein, 94 aa, Homo sapiens
PSMTLEPNKDLRPGDTVTITCSSYRGYPEAEVFWQDGQGVPLTGNVTTSQMANEQGLFDVHSVLRVVLGANGTYSCLVRNPVLQQDAHGSVTIT

SEQ ID NO: 1014 - protein, 14 aa, Artificial Sequence
  Made in Lab - Peptide spacer sequence
EGKSSGSGSESKVD

SEQ ID NO: 1015 - protein, 18 aa, Artificial Sequence
  Made in Lab - Peptide spacer sequence
KESGSVSSEQLAQFRSLD

SEQ ID NO: 1016 - protein, 5 aa, Artificial Sequence
  Made in Lab - peptide linker sequence
GGGGS
